(19) United States
(12) Patent Application Publication
(10) Pub. No.: US 2012/0270216 A1
(43) Pub. Date: Oct. 25, 2012

(54) COMPOSITIONS AND METHODS FOR DETECTING AND IDENTIFYING SALMONELLA ENTERICA STRAINS

(75) Inventors: Craig Cummings, Pacifica, CA (US); Elena Bolchakova, Union City, CA (US); Manohar Furtado, San Ramon, CA (US)

(73) Assignee: LIFE TECHNOLOGIES CORPORATION, Carlsbad, CA (US)

(21) Appl. No.: 13/451,479

(22) Filed: Apr. 19, 2012

Related U.S. Application Data
(60) Provisional application No. 61/477,142, filed on Apr. 19, 2011.

(51) Int. Cl. C12Q 1/68; C07H 21/04

(52) U.S. Cl. 435/6.11; 536/23.7

(57) ABSTRACT

The present specification describes several novel SNPs of Salmonella enterica subsp. enterica. SNP profiles comprising allelic compositions at each SNP position are described which may be used to identify and differentiate different strains and serovars of Salmonella enterica subsp. enterica. The specification also describes several compositions, methods and kits useful for identifying and differentially distinguishing strains and serovars of Salmonella enterica subsp. enterica.

### CROSS-REFERENCE TO RELATED APPLICATIONS

[0001] The present application claims priority to U.S. Provisional Patent Application Ser. No. 61/477,142, filed Apr. 19, 2011, the entire contents of which are incorporated herein by reference in their entirety.

### SEQUENCE LISTING

[0002] The instant application contains a Sequence Listing which has been submitted in ASCII format via EFS-Web and is hereby incorporated by reference in its entirety. Said ASCII copy, created on Apr. 12, 2012, is named LT00497.txt and is 6,160,501 bytes in size.

### FIELD

[0003] The present specification relates, in some embodiments, to compositions, methods and kits for detection and identification of Salmonella enterica subsp. enterica strains and serovars (serological variants). In some embodiments, the disclosure describes several novel single nucleotide polymorphisms (SNPs) and compositions derived therefrom (including probes and primers), which may be used in methods of the disclosure to detect and/or identify a Salmonella enterica subsp. enterica strain from a sample and in some embodiments to identify the serotype of a S. enterica subsp. enterica.

### BACKGROUND

[0004] S. enterica strains and serovars are common food borne microbes causing diseases in humans and in animals. Some S. enterica strains cause enteric (intestinal) infections, often referred to as salmonellosis. Other Salmonella enterica strains such as Salmonella Typhi and S. Paratyphi cause typhoid fever.

[0005] Traditional serotyping, the standard method for characterization of Salmonella enterica serotypes, is laborious and time consuming, and requires the maintenance of large panels of specific antisera, which is feasible for only a small number of large microbiology reference labs.

[0006] Traditional serotyping is also unable to differentiate between evolutionarily distinct subgroups that often exist within a single polypyletic serotype.

### SUMMARY

[0007] The present specification relates in some embodiments to identification of several novel single nucleotide polymorphisms (SNPs). These SNPs may be used to differentially identify S. enterica subsp. enterica strains and serovars. In some embodiments, one or more SNP's identified herein may be used to differentiate between closely related strains and serovars of Salmonella enterica subsp. enterica.

[0008] The present disclosure in some embodiments provides at least 52 SNPs operable to identify Salmonella enterica subsp. enterica strains and serovars. The fifty two novel SNPs identified herein are comprised in nucleic acid sequences comprised in SEQ ID. NOs:1-52 at position 101 in each of these sequences (see Table 2 attached at the end of the specification). The SNPs located at position 101 are shown in Table 2 by a lowercase nucleotide and correspond to a coordinate position (shown in column 1 of Table 2) in the genomic sequence of Salmonella Enteritidis (also referred to as Salmonella enterica subsp. enterica serovar Enteritidis) described in SEQ ID NO: 53 (which is also described in GenBank ID AM933172.1). SEQ ID NOs: 1-52 comprise SNPs of the disclosure at position 101 and are flanked by 100 bp of genomic DNA on either side (3′ and 5′ side) of the SNP (coordinate positions of left and right flanking sequences in reference of the S. Enteritidis genome are shown in columns 2 and 3 of Table 2).

[0009] According to some embodiments, SNPs of the disclosure may be correlated to various Salmonella enterica serotypes and strains and an SNP profile database may be created. Some embodiments describe a computer readable medium used to store a SNP profile database of the disclosure. In some embodiments, a master SNP profile database may be created having all known SNP profiles. An SNP profile of a master database will have data, such as but not limited to, the composition of an SNP allele for each SNP position, and the correlation of SNP allelic compositions at different SNP locations with a serovar and/or a strain.

[0010] Assays and methods may be designed using a SNP profile database for analysis and identification including differential identification of Salmonella strains and/or serovars. For example, to determine the strain and/or serovar, a nucleic acid isolated from a Salmonella enterica containing sample, the sample nucleic acid may be tested to determine the allelic composition for at least ten SNPs selected from a larger panel of predetermined SNPs for which serovars have been correlated (such as for example, a master SNP profile database, which in one embodiment may comprise a profile database of the 52 panel of SNPs of the disclosure). The allelic composition of each SNP tested from the sample may then be stored in a sample nucleic acid SNP profile. The sample nucleic acid SNP profile may then be compared with the master SNP profile database to determine the correlation of SNPs and SNP allelic compositions to a particular Salmonella enterica strain and/or serovar. Determining the presence of certain alleles and certain allelic compositions identifies the strain or serovar of Salmonella enterica. Comparison of SNP profiles and correlation may be performed using a computer system or may be performed manually.

[0011] In other examples, to determine the strain and/or serovar, a nucleic acid isolated from a Salmonella enterica containing sample, the sample nucleic acid may be tested to determine the allelic composition for at least two, at least three, at least four, at least five, at least six, at least seven, at least eight, at least nine and/or at least ten SNPs selected from a larger panel of predetermined SNPs for which serovars have been correlated (such as for example, a master SNP profile database, which in one embodiment may comprise a profile database of the 52 panel of SNPs of the disclosure).

[0012] The present disclosure, in some embodiments, also provides compositions derived from the SNPs of the disclosure. Accordingly, in some embodiments, oligonucleotides comprising primers operable for amplifying (and identifying) one or more SNPs from the nucleic acid of a S. enterica strain are described. Exemplary primers comprise isolated nucleic acid sequences comprised in SEQ ID NOs: 54-105 and SEQ ID NOs: 106-157. However, primers of the disclosure are not limited to the sequences and oligonucleotides disclosed in SEQ ID NOs: 54-157, and one of skill in the art, in light of the present teachings will appreciate that additional primers are also disclosed by the present disclosure. For example, in some embodiments, isolated nucleic acid sequences of the disclosure may have at least 90% sequence identity, at least 80% sequence identity, and/or at least 70% sequence identity to nucleic acid sequences comprised in SEQ ID NOs: 54-157. Other primers may be designed that are to flank a SNP of the disclosure and to form an amplification product comprising an SNP.

[0013] In some embodiments, probes operable for identifying one or more SNPs from the nucleic acid of a S. enterica strain are provided. Exemplary probes are described in SEQ ID NOs: 158-209 which correspond to probes for one allele of a SNP, and SEQ ID NOs: 210-261, which correspond to example probes that may be used to identify the other allele of a SNP. In the probes described in SEQ ID NOs: 158-261 (see Table 3), the lowercase nucleotide corresponds to the SNP. However, probes of the disclosure are not limited to the sequences and nucleotides disclosed in SEQ ID NOs: 158-261, and one of skill in the art, in light of the present teachings will appreciate that additional probes are also disclosed by the present disclosure. For example, any nucleotide sequence having at least 10 nucleotides, at least 20 nucleotides, at least 30 nucleotides, or at least 40 nucleotides, comprising a SNP may be used as a probe. For example, in non limiting examples, any nucleotide having at least nucleotides 100-102 of sequences described in SEQ ID NOs: 1-52 and at least 10 additional nucleotides on either the 5′ or the 3′ side of these sequences may be used as a probe of the disclosure. In other non-limiting examples, any nucleotide having at least nucleotides 100-102 of sequences described in SEQ ID NOs: 1-52 and at least 5 additional nucleotides on both the 5′ and the 3′ side of these sequences may be used as a probe of the disclosure. In yet other embodiments, probe sequences of the disclosure may have at least 90% sequence identity, at least 80% sequence identity, and/or at least 70% sequence identity to nucleic acid sequences comprised in SEQ ID NOs: 54-157.

[0014] The present disclosure, in some embodiments, describes methods for identifying Salmonella enterica strains and serovars based upon determining the allelic composition of one or more SNPs identified herein. In some embodiments, a method may comprise determining the allelic composition of a panel of at least 10 SNPs to identify and/or differentially detect a strain or a serovar of S. enterica. In some embodiments, a method may comprise determining the allelic composition of all the 52 SNPs to identify and/or differentially detect a strain or a serovar of S. enterica. In some embodiments, a method may comprise determining the allelic composition of a panel of at least 2, at least 3, at least 4, at least 5, at least 6, at least 7, at least 8, at least 9 and/or at least 10 SNPs to identify and/or differentially detect a strain or a serovar of S. enterica.

[0015] Determining the allelic compositions and/or genotyping and/or SNP detection may comprises one or more technologies such as but not limited to sequencing (also see the next sentence), amplification, hybridization, high throughput screening methods, bead-based liquid microarray platforms, mass spectrometry, nanostring, microfluidics, chemiluminescence, oligonucleotide ligation, enzyme technologies and combinations thereof. Determining the allelic compositions and/or genotyping and/or SNP detection by sequencing may comprises one or more technologies and/or platforms such as but not limited to genomic sequencing, sequencing targeted regions on CE or semiconductor platforms, multiplex sequencing of all SNP containing regions by CE or semiconductor sequencing and/or by combining with sequencing regions such as but not limited to rfb, fliC and fljB regions on the same platform. Molecular assays to detect SNPs may include amplification performed by a variety of methods such as but not limited to TaqMan®, SnapShot® and other high throughput screening methods know in the art in light of this specification.

[0016] Some methods for identifying and/or detecting S. enterica strains and/or serovars in a sample may comprise using an isolated nucleotide sequence composition of the disclosure for detection. Exemplary compositions of the disclosure used for detection methods may comprise, but are not limited to, SEQ ID NO: 54-157, and/or SEQ ID NO:158-261, fragments thereof, at least 10 contiguous nucleotide sequences thereof, complements thereof, isolated nucleic acid sequence comprising at least 90% nucleic acid sequence identity to the sequences set forth above and/or labeled derivatives thereof.

[0017] In some embodiments, methods of the disclosure may comprise: isolating a nucleic acid from a sample suspected of having a S. enterica strain and/or a sample from which one desires to detect and/or identify a specific S. enterica strain; amplifying one or more SNP comprising nucleic acid sequences (target nucleic acid sequence) from the nucleic acid from the sample to form an amplification product; and determining the allelic composition of the SNP comprised in the amplified product. Amplification may be repeated using a different set of primer pairs, each primer pair operable to hybridize to and amplify a target nucleic acid sequence comprising another SNP and determining the allelic composition of each SNP until the allelic composition of a panel of SNPs is determined. Once sufficient allelic composition is determined a correlation may be made to which serovar or strain of S. enterica the allelic composition may be assigned to. In some embodiments, at least 10 SNPs allelic compositions may be determined. In some embodiments, a panel of at least 10 SNPs selected from the SNPs comprised in SEQ ID NOs: 1-52 may be amplified and detected. In some embodiments, all SNPs comprised SEQ ID NOs: 1-52 may be amplified and detected to identify and/or type a strain of S. enterica. Amplification reactions may be multiplexed to detect a panel of SNPs.

[0018] In some embodiments, a pair of primers used for amplification may comprise the nucleic acid sequence of SEQ ID NO: 54-105, and/or SEQ ID NO: 106-157 and/or labeled derivatives thereof. For example, as shown in Table 3, a primer pair shown as reverse and forward primers may be used to amplify the corresponding SNP in the same row. Thus for example, a primer pair may comprise a first primer and a second primer, the first primer having a SEQ ID NO: 54 may be used as a forward primer, the second primer having a nucleic acid of SEQ ID NO: 106 may be used as a reverse primer may be used to amplify a SNP comprised in SEQ ID NO 1. Primers may be labeled and nucleic acid amplification products may be detected and/or identified by a variety of methods known in the art including but not limited to size analysis of an amplified product; sequencing an amplified product; hybridization with a probe; 5′ nuclease digestion; single-stranded conformation polymorphism; allele specific hybridization; primer specific extension; and oligonucleotide ligation assay.

[0019] In some embodiments, methods of the disclosure may comprise: isolating a nucleic acid from a sample suspected of having a S. enterica strain and/or a sample from which one desires to detect and/or identify a specific S. enterica strain; hybridizing one or more SNP comprising regions of the nucleic acid from the sample using one or more probes, each probe designed to bind specifically to a region comprising an SNP; and detecting the hybridized probe-nucleic acid complex. Probes used may be labeled to enable detection. Multiplex hybrid detection maybe enable by using differentially labeled probes. Other detection methods may comprise size analysis of the hybridized product; sequencing an amplified product; hybridization with a probe; 5′ nuclease digestion; single-stranded conformation polymorphism; and/or allele specific hybridization.

[0020] In some embodiments, probes used for hybridization and/or for detection of amplified products comprising a SNP may comprise the nucleic acid sequence of SEQ ID NO: 158-209, and/or SEQ ID NO: 210-261, and may comprise labeled derivatives thereof. For example, as shown in Table 3, probes 1 labeled with FAM-MGB and/or probes 2 labeled with VIC-MGB may be used to identify the corresponding SNP in the same S. Entritidis coordinate position (see Tables 2 and 3). Thus for example, probes having SEQ ID NO: 158 and SEQ ID NO: 210 may be used to hybridize to an SNP comprised in SEQ ID NO: 1. Each probe is operable to hybridize to one allelic composition of the SNP described in SEQ ID. NO: 1. For example, probe having SEQ ID NO: 158 has a “g” (guanine) at the complementary position, hence it is operable to selectively hybridize to an allelic variant of the SNP in SEQ ID NO: 1 having a “c” (cytosine) allelic composition, whereas probe having SEQ ID NO: 210 has an “a” (adenine) at the complementary position, hence it is operable to selectively hybridize to an allelic variant of the SNP in SEQ ID NO: 1 having a “t” allelic composition. In some embodiments, both probes may be used to determine what the allelic composition of the SNP in SEQ ID NO: 1. For example, a first probe labeled with a first label may be used to hybridize to one allele of the SNP (of SEQ ID NO. 1 for example having the “c” allelic composition) and a second probe labeled with a second label may be used to hybridize to the other allele of a SNP (of SEQ ID NO: 1, this may be for example the “t” allelic composition. In this example embodiment of SEQ ID NO. 1, if a first probe of SEQ ID NO: 158 and a second probe of SEQ ID NO: 210 are used and only the FAM-MGB signal is detected, the allelic composition of the SNP in SEQ ID NO: 1 is “c.” If however, only the VIC-MGB signal is detected, the SNP allelic composition of the SNP of SEQ ID NO: 1 is “t.”

[0021] In some embodiments, a panel of at least 5 and/or at least 10 SNPs selected from the SNPs comprised in SEQ ID NOs: 1-52 may be amplified and the composition of the SNP determined. In some embodiments, all SNPs comprised SEQ ID NOs: 1-52 may be amplified and the allelic composition determined to identify and/or type a strain of S. enterica.

[0022] Molecular assays to detect SNPs may include amplification performed by a variety of methods such as but not limited to TaqMan®, SnapShot® and other high throughput screening methods know in the art in light of this specification.

[0023] Methods of the disclosure may also comprise determining the allelic compositions (i.e. genotyping and/or SNP detection) by one or more technologies in addition to amplification such as but not limited to sequencing, hybridization, hybridization on bead-based liquid microarray platforms, high throughput screening methods, mass spectrometry, nanostring, microfluidics, chemiluminescence, oligonucleotide ligation, enzyme technologies and combinations thereof. In methods of the disclosure, determining the allelic compositions by sequencing may comprises one or more technologies and/or platforms such as but not limited to genomic sequencing, sequencing targeted regions on CE or semiconductor platforms, multiplex sequencing of all SNP containing regions by CE or semiconductor sequencing and/or by combining with sequencing regions such as, but not limited to, rfb, fliC and fljB regions on the same platform.

[0024] Methods of the disclosure may provide one or more advantages listed here. For example, in some embodiments, the methods provide a molecular assay in contrast to traditional immunoassays which may be easier, and/or faster, and/or allow for portable testing options, and/or that may be performed in more accessible settings than traditional serotyping methods.

[0025] Some embodiments of the present disclosure provide kits for detection and/or differential detection and/or identification of S enetrica strains. A kit of the disclosure may comprise one or more isolated nucleic acid sequences of the disclosure as set forth herein. Some nucleic acid compositions of the disclosure may comprise primers for amplification of target nucleic acid sequences comprising one or more SNPs that are specific to one or more strains of a S. enterica that may be present in a sample. Some nucleic acid compositions of the disclosure may comprise probes for the detection of target nucleic acid sequences and/or amplified target nucleic acid regions comprising one or more SNPs from a S. enterica strain present in a sample. Probes and primers comprised in kits may be labeled. Kits may additionally comprise one or more components such as, but not limited to: buffers, enzymes, nucleotides, salts, reagents to process and prepare samples (e.g., reagents to isolate nucleic acids), probes, primers, agents to enable detection and control nucleotides. Each component of a kit of the disclosure may be packaged individually or together in various combinations in one or more suitable container means.

[0026] While specific advantages have been disclosed hereinabove, it will be understood that various embodiments may include all, some, or none of the previously disclosed advantages. Other technical advantages may become readily apparent to those skilled in the art in light of the teachings of the present disclosure.

[0027] These and other features of the present teachings will become more apparent from the detailed description in sections below.

### BRIEF DESCRIPTION OF THE DRAWINGS

[0028] One or more embodiments of the present disclosure may be better understood in reference to one or more the drawings below. The skilled artisan will understand that the drawings, described below, are for illustration purposes only. The drawings are not intended to limit the scope of the present teachings in any way.

[0029] FIG. 1 depicts hierarchical clustering of SNP profiles in Salmonella enterica strains, according to one embodiment of the disclosure.

### DETAILED DESCRIPTION

[0030] It is to be understood that both the foregoing general description and the following detailed description are exemplary and explanatory only and are not intended to limit the scope of the current teachings. In this application, the use of the singular includes the plural unless specifically stated otherwise. Also, the use of “comprise”, “contain”, and “include”, or modifications of those root words, for example but not limited to, “comprises”, “contained”, and “including”, are not intended to be limiting. Use of “or” means “and/or” unless stated otherwise. The term “and/or” means that the terms before and after can be taken together or separately. For illustration purposes, but not as a limitation, “X and/or Y” can mean “X” or “Y” or “X and Y”.

[0031] Whenever a range of values is provided herein, the range is meant to include the starting value and the ending value and any value or value range there between unless otherwise specifically stated. For example, “from 0.2 to 0.5” means 0.2, 0.3, 0.4, 0.5; ranges there between such as 0.2-0.3, 0.3-0.4, 0.2-0.4; increments there between such as 0.25, 0.35, 0.225, 0.335, 0.49; increment ranges there between such as 0.26-0.39; and the like.

[0032] The term “cells” refers to the smallest structural unit of an organism that is capable of independent functioning, consisting of one or more nuclei, cytoplasm, and various organelles, all surrounded by a semipermeable cell membrane.

[0033] As used herein, the term “contacting” as used herein refers to bringing in contact at least two moieties (reagents, cells, nucleic acids) to bring about a change or a reaction in one or all the moieties. The process of contacting may also comprise “incubating” (contacting for a certain time lengths) and/or incubating at certain temperatures to bring about the change or reaction. In some embodiments “contacting” may also refers to the hybridization between a primer and its substantially complementary region.

[0034] The terms “ambient conditions” and “room temperature” are interchangeable and refer to common, prevailing, and uncontrolled atmospheric and weather conditions in a room or place.

[0035] As used herein, the term “analyzing” refers to evaluating and comparing the results of a method. In some exemplary embodiments, “analyzing” refers to evaluating and comparing the results of a sample tested to a second sample and/or to a control in a method of the disclosure.

[0036] As used herein, “complement” and “complements” are used interchangeably and refer to the ability of a nucleotide, a polynucleotide or two single stranded polynucleotides (for instance, a primer and a target polynucleotide) to base pair with each other, where an adenine on one strand of a polynucleotide will base pair to a thymine or uracil on a strand of a second polynucleotide and a cytosine on one strand of a polynucleotide will base pair to a guanine on a strand of a second polynucleotide. Two polynucleotides are complementary to each other when a nucleotide sequence in one polynucleotide can base pair with a nucleotide sequence in a second polynucleotide. For instance, 5′-ATGC-3′ and 5′-GCAT-3′ are complementary.

[0037] As used herein the term “complementary nucleotide sequence” and “complementary sequences” refers to a (second) nucleotide sequence which, by base pairing, is the complement of a first nucleotide sequence. For example, a forward strand with the sequence 5′-ATGGC-3′ would have the complementary nucleotide sequence 3′-TACCG-5′, also termed the “reverse strand.”

[0038] The terms “detecting” and “detection” and “determining” are used in a broad sense herein and encompass any technique by which one can determine the absence or presence of something, and/or identify a nucleic acid sequence and/or an exact allelic composition at an SNP locus that may have one or more alleles at that location and/or a protein encoded by a nucleic acid sequence. In some embodiments, detecting comprises quantitating a detectable signal from the nucleic acid, including without limitation, a real-time detection method, such as quantitative PCR (“Q-PCR”), detection of labels. In some embodiments, detecting comprises determining the sequence of an amplification product to determine the sequence of an allele.

[0039] As used here, “distinguishing” and “distinguishable” are used interchangeably and refer to differentiating between at least two results from substantially similar or identical reactions, including but not limited to, two different amplification products, two different melting temperatures, two different melt curves, and the like. The results can be from a single reaction, two reactions conducted in parallel, two reactions conducted independently, i.e., separate days, operators, laboratories, and so on. As used herein, “presence” refers to the existence (and therefore to the detection) of a reaction, a product of a method or a process (including but not limited to, an amplification product resulting from an amplification reaction), or to the “presence” and “detection” of an organism such as a pathogenic organism or a particular strain or species of an organism.

[0040] The term “or combinations thereof” as used herein refers to all permutations and combinations of the listed items preceding the term. For example, “A, B, C, or combinations thereof” is intended to include at least one of: A, B, C, AB, AC, BC, or ABC, and if order is important in a particular context, also BA, CA, CB, ACB, CBA, BCA, BAC, or CAB. Continuing with this example, expressly included are combinations that contain repeats of one or more item or term, such as BB, AAA, AAB, BBC, AAABCCCC, CBBAAA, CABABB, and so forth. The skilled artisan will understand that typically there is no limit on the number of items or terms in any combination, unless otherwise apparent from the context.

[0041] As used herein, the term “genome” refers to the complete nucleic acid sequence, containing the entire genetic information, of a bacterium, a virus, a plasmid, a gamete, an individual, a population, a species, or a strain of a species.

[0042] As used herein, the term “pseudochromosome” refers to the concatenation, in their most likely order, of all available sequence contigs and scaffolds derived from sequencing of a bacterial genome, in which undefined gaps between contigs and scaffolds are represented by unidentified nucleobases.

[0043] As used herein, the term “genomic DNA” refers to the chromosomal DNA sequence of a gene or segment of a gene including the DNA sequence of non-coding as well as coding regions. Genomic DNA also refers to DNA isolated directly from cells, chromosomes or plasmid(s) within the genome of an organism, or cloned copies of all or part of such DNA.

### Identification and Selection of SNPs

[0044] The present specification relates in some embodiments to identification and selection of several novel single nucleotide polymorphisms (SNPs) that may be used to differentially identify S enterica strains from each other including in some embodiments, to differentiate between closely related strains of Salmonella.

[0045] A “single nucleotide polymorphism” or “SNP” refers to a variation in the nucleotide sequence of a polynucleotide that differs from another polynucleotide by a single nucleotide difference. For example, without limitation, exchanging one A for one C, G or T in the entire sequence of polynucleotide constitutes a SNP. It is possible to have more than one SNP in a particular polynucleotide. For example, at one position in a polynucleotide, a C may be exchanged for a T, at another position a G may be exchanged for an A and so on. When referring to SNPs, the polynucleotide is most often DNA.

[0046] The present disclosure in some embodiments provides at least 52 SNPs comprised in nucleic acid sequences comprised in SEQ ID. NOs: 1-52 at position 101 in each of these sequences. SEQ ID NOs: 1-52 comprise SNPs of the disclosure at position 101 and are flanked by 100 bp of genomic DNA on either side (3′ and 5′ side) of the SNP.

[0047] The SNP position in SEQ ID. NOs: 1-52 is indicated by a lowercase letter. The flanking sequences and SNPs are corresponding sequences from a single Salmonella genome (S. Enteritidis, GenBank ID AM933172.1, also described herein as SEQ ID NO. 53). Other Salmonella genomes may differ slightly at other bases within this sequence.

[0048] In some embodiments, the disclosure describes compositions comprising isolated nucleic acid sequences having SEQ ID. NOs: 1-52, fragments thereof (including fragments having at least 10 contiguous nucleotides thereof, fragments having at least 20 contiguous nucleotides thereof, fragments having at least 30 contiguous nucleotides thereof, fragments having at least 40 contiguous nucleotides thereof, fragments having at least 50 contiguous nucleotides thereof, and/or fragments having at least 60 contiguous nucleotides thereof), as well as sequences having at least 90% sequence identity, at least 80% sequence identity, and/or at least 70% sequence identity to nucleic acid sequences comprised therein and complementary sequences thereof.

[0049] In some embodiments, isolated nucleic acid sequences of the disclosure comprising SEQ ID. NOs: 1-52 may have at least 90% sequence identity, at least 80% sequence identity, and/or at least 70% sequence identity to nucleic acid sequences comprised therein.

[0050] An isolated SNP-containing nucleic acid molecule may comprise one or more SNP positions disclosed by the present invention with flanking nucleotide sequences on either side of the SNP positions. A flanking sequence can include nucleotide residues that are naturally associated with the SNP site and/or heterologous nucleotide sequences. Although sequences described have 100 bp of flanking nucleic acid sequences, the flanking sequence may be up to about 500, 400, 300, 200, 100, 60, 50, 40, 30, 25, 20, 15, 10, 8, or 4 nucleotides (or any other length in-between) on either side of a SNP position.

[0051] In some embodiments, the present disclosure relates to identification of novel SNP loci in Salmonella enterica strains. In order to identify nucleic acid sequences that are conserved in all Salmonella enterica strains, 34 completely sequenced S. enterica serotypes, including 16 presently sequenced strains and 18 publicly available serotypes, were aligned to the S. Enteritidis genome using the open-source whole-genome alignment tool, MUMmer. A list of 34 Salmonella enterica strains are provided in Table 1 attached at the end of the specification. A total of 282 kb of conserved chromosomal sequences were identified. Each of the genomes was then compared to the S. Enteritidis genome (GenBank ID AM933172.1 represented by SEQ ID NO. 53) and 10,101 single nucleotide polymorphisms (SNPs) in these conserved chromosomal regions were identified.

[0052] The 10,101 SNPs were screened to identify SNPs specific for different strains. In order to select the most highly discriminative SNPs, the set of 34 genomes was randomly partitioned into two groups 10,000 times, and at each iteration, an SNP with the most highly correlated profile (i.e., most capable of distinguishing between the two random groups) was selected. These were then sorted to obtain the best set of 48 SNPs (shown in Table 2 as SEQ ID NOs: 1-3, 6-13, 15-45, and 47-52. These 48 SNPs identified in the present disclosure vary significantly across the population, but are not associated with any phylogenetic signal. In some embodiments, the 48 SNPs are functional to discriminate between most strains of Salmonella enterica subsp. enterica.

[0053] In some embodiments, the disclosure also identifies four additional SNP's operable to differentially identify and discriminate between closely related strains of S. enterica, including between S. Enteritidis and S. Gallinarum; between S. Paratyphi C; and S. Choleraesuis; and between S. Johannesburg and S. Urbana. These four additional SNPs are described in Table 2 as SEQ ID NOs: 4, 5, 14, and 46. These 4 SNPs were manually selected by the present inventors using the selection criteria described above.

[0054] Accordingly, the present disclosure identifies a total of 52 unique SNP sequences that are listed in Table 2 as having SEQ ID NOs: 1-52. In some embodiments, the 52 SNPs or subsets selected therefrom are described as an SNP panel. For example an SNP panel of the disclosure may comprise at least 10 SNPs selected from the 52 SNPs identified.

[0055] In some embodiments, a SNP panel of the disclosure may be stored in a database such as a database located in a computer readable medium. “Computer readable media” refers to any media which can be read and accessed directly by a computer, and includes, but is not limited to: magnetic storage media such as floppy discs, hard storage medium and magnetic tape; optical storage media such as optical discs or CD-ROM; electrical storage media such as RAM and ROM; and hybrids of these categories, such as magnetic/optical media. By providing such computer readable media, a database comprising SNPs or other data compiled on SNPs may be routinely accessed by a user and used for analysis or designing experiments.

[0056] In some embodiments, SNPs of the disclosure may be correlated to Salmonella serotypes and/or strains and an SNP profile database may be created. Some embodiments describe a computer readable medium used to store a SNP profile database of the disclosure.

[0057] In some embodiments, SNP profile database and SNP panel databases may be used to design and analyze assays and methods that use a computer system for analysis and identification of Salmonella strains and/or serovars (including differential identification assays and assays correlating SNPs with serotypes). Such methods may also involve data analysis using a “data analysis module” which may include any person or machine, individually or working together, which analyzes the sample and determines the genetic information contained therein. The term may include a person or machine within a laboratory setting.

[0058] A “computer system” refers to the hardware means, software means and data storage means used to compile the data of the present invention. The minimum hard ware means of computer-based systems of the invention may comprise a central processing unit (CPU), input means, output means, and data storage means. Desirably, a monitor is provided to visualize structure data. The data storage means may be RAM or other means for accessing computer readable media of the invention. Examples of such systems are microcomputer workstations available from Silicon Graphics Incorporated and Sun Microsystems running Unix based, Linux, Windows NT, XP or IBM OS/2 operating systems.

[0059] Hierarchical clustering of SNP profiles (depicted in FIG. 1) showed that, in some embodiments, strains of the same serotype have identical profiles. For example, each of four S. Typhimurium strains, each of two S. Typhi strains and each of two S. Paratyphi A strains had identical SNP profiles. The closely related pairs (listed above) differ by two SNPs. Other more unrelated strains differ significantly. For example, the next closely matched pair was the S. Minnesota and the S. Gaminara pair which differed by eight SNPs.

### Validation of SNP Loci

[0060] The genetic loci of SNPs identified in the present disclosure were tested and analyzed in several additional strains of S. enterica (including 13 newly available S. enterica genomes—see details below). The 52 SNP loci were found to be present in every strain of S. enterica analyzed by the present inventors.

[0061] For example, in order to test the effectiveness of the 52 SNP panel to distinguish new serovars, the genotype at each of the SNP positions was extracted from an additional 13 publicly available draft S. enterica genomes, bringing the total number of genomes analyzed to 47 strains representing 37 serovars. Most new serovars were clearly distinguishable from the set of serovars used to construct the 52 SNP panel. The only exception was serovar 4,5,12:i:-, which could not be differentiated from S. Typhimurium at these SNP positions. These two serovars are known to be very closely related.

[0062] Two of the draft genomes are additional isolates of serovars used to construct the panel and comprise the serovars Heidelberg and Schwarzengrund. These have identical profiles to the genomes of completely sequenced Salmonella genomes representing the same serovar. In addition, the two draft S. Kentucky genomes were also identical.

[0063] Two of the 13 new serovars tested, including the draft genomes of S. Newport and S. Saintpaul, gave discrepant results. The draft S. Newport genome was found to have a genome profile completely unrelated to the complete Newport genome that used to construct the 52 SNP profile of the present disclosure. Previous work, based on MLST, has demonstrated that Newport isolates can be separated into two distinct evolutionary lineages. Based on the present results it appears that the draft Newport genome represents the other evolutionary lineage. The two draft S. Saintpaul genomes also gave very different profiles. However, as stated at the NCBI genome project pages, “The selected strains are from separate lineages representing genovar groupings: strain SARA23 falls within the main clade for the serovar, and strain SARA29 is an outlier.” Together, the draft S. Newport and S. Saintpaul results indicate that a single serovar may comprise multiple unrelated genetic types, and that these will be reflected in different SNP profiles.

[0064] These results further reinforce the stability of the present 52 SNP profile for serovar identification. Accordingly, the present disclosure provides a SNP profile that may be used to establish an interpretable SNP profile for any Salmonella enterica strain using a molecular assay format using the same set-of assay reagents.

[0065] In contrast to the present SNPs and SNP profile based assays, another previous SNP based assay targeted a set of five S. enterica serovars. These assays are however limited to be able to identify only the five targeted serovars and do not provide identification of non-targeted serovars (Ben-Darif, JOURNAL OF CLINICAL MICROBIOLOGY, April 2010, p. 1055-1060 Vol. 48, No. 4).

### Compositions of the Disclosure

[0066] The present disclosure, in some embodiments, also provides compositions derived from one or more SNPs identifies here. Accordingly, in some embodiments, oligonucleotides comprising primers operable for amplifying (and identifying) one or more SNPs from the nucleic acid of a S. enterica strain are described. Exemplary primers may comprise isolated nucleic acid sequences comprised in SEQ ID NOs: 54-105 and SEQ ID NOs: 106-157. However, primers of the disclosure are not limited to the sequences and oligonucleotides disclosed in SEQ ID NOs: 54-157, and one of skill in the art, in light of the present teachings will appreciate that additional primers are also disclosed by the present disclosure. For example, in some embodiments, isolated nucleic acid sequences of the disclosure may have at least 90% sequence identity, at least 80% sequence identity, and/or at least 70% sequence identity to nucleic acid sequences comprised in SEQ ID NOs: 54-157. In other examples, any nucleotide having at least 10 nucleotides on one strand and at least 10 nucleotides on a complementary strand of the first strand that flank a SNP of the disclosure to form an amplification product.

[0067] In some embodiments, compositions of the disclosure comprise probes operable for identifying one or more SNPs from the nucleic acid of a S. enterica strain are provided. Exemplary probes are described in SEQ ID NOs: 158-209 which correspond to probes for one allele of an SNP, and SEQ ID NOs: 210-261 correspond to example probes that may be used to identify an SNP on the other allele. In the probes described in SEQ ID NOs: 158-261 (see Table 3), the lowercase nucleotide corresponds to the SNP. However, probes of the disclosure are not limited to the sequences and nucleotides disclosed in SEQ ID NOs: 158-261, and one of skill in the art, in light of the present teachings will appreciate that additional probes are also disclosed by the present disclosure. For example, any nucleotide sequence having at least 10 nucleotides, at least 20 nucleotides, at least 30 nucleotides, or at least 40 nucleotides, comprising a SNP may be used as a probe. For example, in non limiting examples, any nucleotide having at least nucleotides 100-102 of sequences described in SEQ ID NOs: 1-52 and at least 10 additional nucleotides on either the 5′ or the 3′ side of these sequences may be used as a probe of the disclosure. In other non-limiting examples, any nucleotide having at least nucleotides 100-102 of sequences described in SEQ ID NOs: 1-52 and at least 5 additional nucleotides on both the 5′ and the 3′ side of these sequences may be used as a probe of the disclosure. In yet other embodiments, primer sequences of the disclosure may have at least 90% sequence identity, at least 80% sequence identity, and/or at least 70% sequence identity to nucleic acid sequences comprised in SEQ ID NOs: 54-157.

[0068] In some embodiments, the disclosure describes compositions comprising isolated nucleic acid sequences having SEQ ID. NOs: 1-52, fragments thereof (including fragments having at least 10 contiguous nucleotides thereof, fragments having at least 15 contiguous nucleotides thereof, fragments having at least 20 contiguous nucleotides thereof, fragments having at least 30 contiguous nucleotides thereof, fragments having at least 40 contiguous nucleotides thereof, fragments having at least 50 contiguous nucleotides thereof, and/or fragments having at least 60 contiguous nucleotides thereof), as well as sequences having at least 90% sequence identity, at least 80% sequence identity, and/or at least 70% sequence identity to nucleic acid sequences comprised therein and complementary sequences thereof. In some embodiments, fragments of the isolated nucleotide sequences derived from SEQ ID NO: 1-SEQ ID NO: 52, as described above, also comprise at least nucleotides located at positions 100-103 of SEQ ID NO: 1-SEQ ID NO: 52, i.e., comprise a SNP of the disclosure. Isolated nucleic acids fragments comprising at least 10 (or more) contiguous nucleotides may be used as primers and/or probes of the disclosure. In some embodiments, isolated nucleic acids fragments comprising at least 10, or at least 15, (or more) contiguous nucleotides and further comprising at least nucleotides located at positions 100-103 of SEQ ID NO: 1-SEQ ID NO: 52, i.e., comprise a SNP of the disclosure may be used as primers and/or probes of the disclosure.

[0069] In some embodiments, isolated nucleic acid sequences of the disclosure comprising SEQ ID. NOs: 1-52 may have at least 90% sequence identity, at least 80% sequence identity, and/or at least 70% sequence identity to nucleic acid sequences comprised therein.

[0070] Nucleic acids, probes and primers of the disclosure may be further labeled. The term “label” refers to any moiety which can be attached to a molecule and: (i) provides a detectable signal; (ii) interacts with a second label to modify the detectable signal provided by the second label, e.g. FRET; (iii) stabilizes hybridization, i.e. duplex formation; or (iv) provides a capture moiety, i.e. affinity, antibody/antigen, ionic complexation. Labeling can be accomplished using any one of a large number of known techniques employing known labels, linkages, linking groups, reagents, reaction conditions, and analysis and purification methods. Labels include light-emitting compounds which generate a detectable signal by fluorescence, chemiluminescence, or bioluminescence (Kricka, L. in Nonisotopic DNA Probe Techniques (1992), Academic Press, San Diego, pp. 3-28). Another class of labels comprise hybridization-stabilizing moieties which serve to enhance, stabilize, or influence hybridization of duplexes, e.g. intercalators, minor-groove binders, and cross-linking functional groups (Blackburn, G. and Gait, M. Eds. “DNA and RNA structure” in Nucleic Acids in Chemistry and Biology, 2^{nd} Edition, (1996) Oxford University Press, pp. 15-81). Yet another class of labels effect the separation or immobilization of a molecule by specific or non-specific capture, for example biotin, digoxigenin, and other haptens (Andrus, A. “Chemical methods for 5′ non-isotopic labeling of PCR probes and primers” (1995) in PCR 2: A Practical Approach, Oxford University Press, Oxford, pp. 39-54). A label may include but is not limited to a dye, a radioactive isotope, a chemiluminescent label, a fluorescent moiety, a bioluminescent moiety, and/or an enzyme.

[0071] As used herein, the terms “polynucleotide”, “oligonucleotide”, and “nucleic acid sequences” are used interchangeably and refer to single-stranded and double-stranded polymers of nucleotide monomers, including without limitation 2′-deoxyribonucleotides (DNA) and ribonucleotides (RNA) linked by internucleotide phosphodiester bond linkages, or internucleotide analogs, and associated counter ions, e.g., H⁺, NH₄⁺, trialkylammonium, Mg²⁺, Na⁺, and the like. A polynucleotide may be composed entirely of deoxyribonucleotides, entirely of ribonucleotides, or chimeric mixtures thereof and can include nucleotide analogs. The nucleotide monomer units may comprise any nucleotide or nucleotide analog. Polynucleotides typically range in size from a few monomeric units, e.g. 5-40 when they are sometimes referred to in the art as oligonucleotides, to several thousands of monomeric nucleotide units. Unless denoted otherwise, whenever a polynucleotide sequence is represented, it will be understood that the nucleotides are in 5′ to 3′ order from left to right and that “A” denotes deoxyadenosine, “C” denotes deoxycytosine, “G” denotes deoxyguanosine, “T” denotes thymidine, and “U” denotes deoxyuridine, unless otherwise noted.

[0072] An “isolated” polynucleotide or oligonucleotide is one that is substantially pure of the materials with which it is associated in its native environment. By substantially free, is meant at least 50%, at least 55%, at least 60%, at least 65%, at advantageously at least 70%, at least 75%, more advantageously at least 80%, at least 85%, even more advantageously at least 90%, at least 91%, at least 92%, at least 93%, at least 94%, at least 95%, at least 96%, at least 97%, most advantageously at least 98%, at least 99%, at least 99.5%, at least 99.9% free of these materials.

[0073] An “isolated” nucleic acid molecule is a nucleic acid molecule separate and discrete from the whole organism with which the molecule is found in nature; or a nucleic acid molecule devoid, in whole or part, of sequences normally associated with it in nature; or a sequence, as it exists in nature, but having heterologous sequences in association therewith.

[0074] As used herein, the term “nucleotide” or “nt” refers to a base-sugar-phosphate combination. Nucleotides are monomeric units of a nucleic acid molecule (DNA and RNA). The term nucleotide includes ribonucleoside triphosphates ATP, UTP, CTG, GTP and deoxyribonucleoside triphosphates such as dATP, dCTP, dITP, dUTP, dGTP, dTTP, or derivatives thereof. Such derivatives include, for example, 7-deaza-dGTP and 7-deaza-dATP. The term nucleotide as used herein also refers to dideoxyribonucleoside triphosphates (ddNTPs) and their derivatives. Examples of dideoxyribonucleoside triphosphates include, but are not limited to, ddATP, ddCTP, ddGTP, ddITP, and ddTTP.

[0075] As used herein, the phrase “nucleic acid molecule” refers to a sequence of contiguous nucleotides (riboNTPs, dNTPs or ddNTPs, or combinations thereof) of any length which can encode a full length polypeptide or a fragment of any length thereof, or which can be non-coding. As used herein, the terms “nucleic acid molecule” and “polynucleotide” can be used interchangeably and include both RNA and DNA.

[0076] The terms “identity”, “nucleic acid sequence identity” and “sequence identity” are used interchangeably and refer to the percentage of pair-wise identical residues—following homology alignment of a sequence of a polynucleotide with a sequence in question—with respect to the number of residues in the longer of these two sequences. The term “identity” as known in the art refers to a relationship between the sequences of two or more polypeptide molecules or two or more nucleic acid molecules, as determined by comparing the sequences. In the art, “identity” also means the degree of sequence relatedness between nucleic acid molecules or polypeptides, as the case may be, as determined by the match between strings of two or more nucleotide or two or more amino acid sequences. “Identity” measures the percent of identical matches between the smaller of two or more sequences with gap alignments (if any) addressed by a particular mathematical model or computer program (i.e., “algorithms”).

[0077] The term “percent (%) nucleic acid sequence identity” with respect to a nucleic acid sequence refers to the percentage of nucleotides in a first sequence that are identical with the nucleotides in a second nucleic acid sequence of interest, after aligning the sequences and introducing gaps, if necessary, to achieve the maximum percent sequence identity. Alignment for purposes of determining percent nucleic acid sequence identity can be achieved in various ways that are known to one of skill in the art, for instance, using publicly available computer software such as BLAST, BLAST-2, ALIGN or Megalign (DNASTAR) software.

[0078] Percent nucleic acid sequence identity may also be determined using the sequence comparison program NCBI-BLAST2 (Altschul et al., Nucleic Acids Res. 25:3389-3402 (1997)). The NCBI-BLAST2 sequence comparison program may be downloaded from http://www.ncbi.nlm.nih.gov or otherwise obtained from the National Institute of Health, Bethesda, Md. NCBI-BLAST2 uses several search parameters, wherein all of those search parameters are set to default values including, for example, unmask=yes, strand=all, expected occurrences=10, minimum low complexity length=15/5, multi-pass e-value=0.01, constant for multi-pass=25, dropoff for final gapped alignment=25 and scoring matrix=BLOSUM62.

[0079] In situations where NCBI-BLAST2 is employed for sequence comparisons, the % nucleic acid sequence identity of a given nucleic acid sequence C to, with, or against a given nucleic acid sequence D (which can alternatively be phrased as a given nucleic acid sequence C that has or comprises a certain % nucleic acid sequence identity to, with, or against a given nucleic acid sequence D) is calculated as follows: 100 times the fraction W/Z where W is the number of nucleotides scored as identical matches by the sequence alignment program NCBI-BLAST2 in that program's alignment of C and D, and where Z is the total number of nucleotides in D. It will be appreciated that where the length of nucleic acid sequence C is not equal to the length of nucleic acid sequence D, the % nucleic acid sequence identity of C to D will not equal the % nucleic acid sequence identity of D to C.

### Methods Using a SNP Panel of the Disclosure

[0080] The present disclosure, in some embodiments, describes methods for identifying and/or distinguishing and/or differentially detecting a Salmonella enterica strain and serovars from a sample and the method comprises detecting the presence or absence of one or more SNPs identified herein.

[0081] As used herein the term “sample” may refer to a starting material suspected of harboring a particular strain or serovar of Salmonella enterica. A “contaminated sample” refers to a sample harboring a Salmonella enterica microbe thereby comprising nucleic acid material from the microbe. Examples of samples include, but are not limited to, food samples (including but not limited to samples from food intended for human or animal consumption such as processed foods, raw food material, produce (e.g., fruit and vegetables), legumes, meats (from livestock animals and/or game animals), fish, sea food, nuts, beverages, drinks, fermentation broths, and/or a selectively enriched food matrix comprising any of the above listed foods), water samples, environmental samples (e.g., soil samples, dirt samples, garbage samples, sewage samples, industrial effluent samples, air samples, or water samples from a variety of water bodies such as lakes, rivers, ponds etc.,), air samples (from the environment or from a room or a building), forensic samples, agricultural samples, pharmaceutical samples, biopharmaceutical samples, samples from food processing and manufacturing surfaces, and/or biological samples. A “biological sample” refers to a sample obtained from mammals: such as a human, a cow, a pig, a livestock animal, a rabbit, a game animal, and/or a member of the family Muridae (a murine animal such as rat or mouse); and other animals and birds such as a chicken, a turkey, a fish, a crab, a crustacean. A biological sample may include blood, urine, feces, or other materials from a human or a livestock animal. A biological sample can be, for instance, in the form of a single cell, in the form of a tissue, or in the form of a fluid.

[0082] Prior to detecting the presence of one or more SNPs or a SNP panel in the nucleic acid contained in a sample, a sample may be prepared and/or processed. As used herein “preparing” or “preparing a sample” or “processing” or processing a sample” refers to one or more of the following steps to achieve extraction and separation of a nucleic acid from a sample: (1) bacterial enrichment, (2) separation of bacterial cells from the sample, (3) cell lysis, and (4) nucleic acid extraction and/or purification (e.g., DNA extraction, total DNA extraction, genomic DNA extraction, RNA extraction). Nucleic acid extracted may then be analyzed for presence of one or more SNP.

[0083] A method of identifying a strain or serovar of Salmonella enterica in a sample comprises: testing a nucleic acid isolated from the sample to determine an allele corresponding to a single nucleotide polymorphisms (SNP) for at least ten SNPs; and determining the allelic composition for the at least ten SNPs selected from the panel of SNPs, wherein the presence of certain alleles identifies the strain or serovar of Salmonella enterica.

[0084] In some embodiments, determining an allele corresponding to a single nucleotide polymorphism (SNP) for at least ten SNPs comprises determining the allelic composition of at least 10 SNP's from a panel of fifty two SNPs comprised at position 101 in nucleic acid sequences described in SEQ ID NO: 1-SEQ ID NO: 52 or complementary sequences thereof.

[0085] In some embodiments, a method of the disclosure further comprises the steps of: creating a SNP profile of the sample nucleic acids comprising the allelic composition of each SNPs for the at least ten SNPs selected from a panel of SNPs (such as, for example, a panel of fifty two SNPs identified herein or larger or smaller panels of SNP's); comparing the SNP profile of the sample nucleic acids with a database of Salmonella enterica strains SNP profiles; and determining the strain or serovar of the Salmonella enterica comprised in the sample, wherein the presence of certain alleles identifies the strain or serovar of Salmonella enterica.

[0086] A method of identifying a strain or serovar of Salmonella enterica in a sample can comprise: determining an allele corresponding to a single nucleotide polymorphisms (SNP) for at least ten SNPs from nucleic acids isolated from the sample; and determining the allelic composition for the at least ten SNPs selected from a panel of SNPs, wherein the presence of certain alleles identifies the strain or serovar of Salmonella enterica. The method can further comprising the steps of: creating a SNP profile of the sample nucleic acids comprising the allelic composition of each SNPs for the at least ten SNPs selected from the panel of SNPs; comparing the SNP profile of the sample nucleic acids with a database of Salmonella enterica strains SNP profiles; and determining the strain or serovar of the Salmonella enterica comprised in the sample, wherein the presence of certain alleles identifies the strain or serovar of Salmonella enterica. In some exemplary embodiments, the panel of SNPs comprises fifty two SNPs comprised at position 101 in nucleic acid sequences described in SEQ ID NO: 1-SEQ ID NO: 52 or complementary sequences thereof.

[0087] In some embodiments of the methods, determining the allelic composition comprises testing the nucleic acid isolated from the sample to determine an allele corresponding to a single nucleotide polymorphisms (SNP) wherein the testing comprises the steps of: a) identifying at least a first target nucleic acid sequence comprising a first SNP from the at least 10 SNPs selected from the panel of fifty two SNPs comprised at position 101 in nucleic acid sequences described in SEQ ID NO: 1-SEQ ID NO: 52 or complementary sequences thereof; b) hybridizing at least a first pair of polynucleotide primers to the first target nucleic acid sequence comprising a first SNP; c) amplifying the first target nucleic acid sequence to form a first amplified target nucleic acid sequence product comprising the first SNP; d) determining the allelic composition of the first SNP from the first amplified target nucleic acid sequence product comprising the first SNP; e) repeating steps a)-d) using a different set of primer pairs, each primer pair operable to hybridize to and amplify a target nucleic acid sequence comprising another SNP and determining the allelic composition of each SNP until the allelic composition of the at least 10 SNPs are determined.

[0088] In some embodiments, a method of the disclosure may comprise detecting the allelic composition of a panel of at least 10 SNPs to identify and/or differentially detect a strain or a serovar of S. enterica from a sample. In some embodiments, a method may comprise detecting allelic composition of all the 52 SNPs to identify and/or differentially detect a strain or a serovar of S. enterica.

[0089] Determining the allelic compositions and/or genotyping and/or SNP detection may comprises one or more technologies such as but not limited to sequencing (also see the next sentence), amplification, hybridization, bead-based liquid microarray platforms, high throughput screening methods, mass spectrometry, nanostring, microfluidics, chemiluminescence, oligonucleotide ligation, enzyme technologies and combinations thereof. Determining the allelic compositions and/or genotyping and/or SNP detection by sequencing may comprises one or more technologies and/or platforms such as but not limited to genomic sequencing, sequencing targeted regions on CE or semiconductor platforms, multiplex sequencing of all SNP containing regions by CE or semiconductor sequencing and/or by combining with sequencing regions such as but not limited to rfb, fliC and fljB regions on the same platform. Molecular assays to detect SNPs may include amplification performed by a variety of methods such as but not limited to TaqMan®, SnapShot® and other high throughput screening methods know in the art in light of this specification.

[0090] Some methods for identifying and/or detecting S. enterica strains in a sample may comprise using an isolated nucleotide sequence composition of the disclosure for detection. Exemplary compositions of the disclosure used for detection methods may comprise, but are not limited to, SEQ ID NO: 54-157, and/or SEQ ID NO:158-261, fragments thereof, at least 10 contiguous nucleotide sequences thereof, complements thereof, isolated nucleic acid sequence comprising at least 90% nucleic acid sequence identity to the sequences set forth above and/or labeled derivatives thereof.

[0091] In some embodiments, methods of the disclosure may comprise: isolating a nucleic acid from a sample suspected of having a S. enterica strain and/or a sample from which one desires to detect and/or identify a specific S. enterica strain; amplifying one or more SNP comprising nucleic acid sequences (nucleotides) from the nucleic acid from the sample to form an amplification product; and detecting and determining the allelic composition of an amplification product comprising an SNP, correlating the allelic composition of the SNP in the nucleic acid of the sample to known S. enterica strain/serovar allelic compositions. Amplification reactions may be multiplexed to detect a panel of SNPs. In some embodiments, a panel of at least 10 SNPs selected from the SNPs comprised in SEQ ID NOs: 1-52 may be amplified and detected. In some embodiments, all SNPs comprised SEQ ID NOs: 1-52 may be amplified and detected to identify and/or type a strain of S. enterica.

[0092] In some embodiments, a pair of primers used for amplification may comprise the nucleic acid sequence of SEQ ID NO: 54-105, and/or SEQ ID NO: 106-157, fragments thereof, at least 10 contiguous nucleotide sequences thereof, complements thereof, isolated nucleic acid sequence comprising at least 90% nucleic acid sequence identity to the sequences set forth above and/or labeled derivatives thereof. For example, as shown in Table 3, a primer pair shown as reverse and forward primers may be used to amplify the corresponding SNP in the same row. Thus for example, a primer pair may comprise a first primer and a second primer, the first primer having a SEQ ID NO: 54 may be used as a forward primer, the second primer having a nucleic acid of SEQ ID NO: 106 may be used as a reverse primer may be used to amplify a SNP comprised in SEQ ID NO 1. Primers may be labeled and nucleic acid amplification products may be detected and/or identified by a variety of methods known in the art including but not limited to size analysis of an amplified product; sequencing an amplified product; hybridization with a probe; 5′ nuclease digestion; single-stranded conformation polymorphism; allele specific hybridization; primer specific extension; and oligonucleotide ligation assay.

[0093] The term “primer” refers to a polynucleotide and analogs thereof that are capable of selectively hybridizing to a target nucleic acid or a “template,” a target region flanking sequence or to a corresponding primer-binding site of an amplification product; and allows detection of a double-stranded nucleic acid formed by hybridization or the synthesis of a sequence complementary to the corresponding polynucleotide template, flanking sequence or amplification product from the primer's 3′ end. Typically a primer can be between about 10 to 100 nucleotides in length and can provide a point of initiation for template-directed synthesis of a polynucleotide complementary to the template, which can take place, in the presence of appropriate enzyme(s), cofactors, substrates such as nucleotides and the like.

[0094] As used herein, the term “amplification primer” refers to an oligonucleotide, capable of annealing to an RNA or DNA region adjacent a target nucleic acid sequence, and serving as an initiation primer for nucleic acid synthesis under suitable conditions well known in the art. Typically, a PCR reaction employs a pair of amplification primers including an “upstream” or “forward” primer and a “downstream” or “reverse” primer, which delimit a region of the RNA or DNA to be amplified.

[0095] As used herein, the term “primer-binding site” refers to a region of a polynucleotide sequence, typically a sequence flanking a target region and/or an amplicon that can serve directly, or by virtue of its complement, as the template upon which a primer can anneal for any suitable primer extension reaction known in the art, for example, but not limited to, PCR. It will be appreciated by those of skill in the art that when two primer-binding sites are present on a single polynucleotide, the orientation of the two primer-binding sites is generally different. For example, one primer of a primer pair is complementary to and can hybridize with the first primer-binding site, while the corresponding primer of the primer pair is designed to hybridize with the complement of the second primer-binding site. Stated another way, in some embodiments the first primer-binding site can be in a sense orientation, and the second primer-binding site can be in an antisense orientation. A primer-binding site of an amplicon may, but need not comprise the same sequence as or at least some of the sequence of the target flanking sequence or its complement.

[0096] The terms “amplifying” and “amplification” are used in a broad sense and refer to any technique by which a target region, an amplicon, or at least part of an amplicon, is reproduced or copied (including the synthesis of a complementary strand), typically in a template-dependent manner, including a broad range of techniques for amplifying nucleic acid sequences, either linearly or exponentially. Some non-limiting examples of amplification techniques include primer extension, including the polymerase chain reaction (PCR), reverse transcription polymerase chain reaction (RT-PCR), asynchronous PCR (A-PCR), and asymmetric PCR (AM-PCR), strand displacement amplification (SDA), multiple displacement amplification (MDA), nucleic acid strand-based amplification (NASBA), rolling circle amplification (RCA), transcription-mediated amplification (TMA), and the like, including multiplex versions, and combinations thereof. Descriptions of certain amplification techniques can be found in, among other places, Molecular Cloning, A Laboratory Manual, Cold Spring Harbor Press, 3d ed., 2001 (hereinafter “Sambrook and Russell”); Sambrook et al.; Ausubel et al.; PCR Primer: A Laboratory Manual, Diffenbach, Ed., Cold Spring Harbor Press (1995); Msuih et al., J. Clin. Micro. 34:501-07 (1996); McPherson; Rapley; U.S. Pat. Nos. 6,027,998 and 6,511,810; PCT Publication Nos. WO 97/31256 and WO 01/92579; Ehrlich et al., Science 252:1643-50 (1991); Favis et al., Nature Biotechnology 18:561-64 (2000); Protocols & Applications Guide, rev. 9/04, Promega, Madison, Wis.; and Rabenau et al., Infection 28:97-102 (2000).

[0097] The terms “amplicon,” “amplification product” and “amplified sequence” are used interchangeably herein and refer to a broad range of techniques for increasing polynucleotide sequences, either linearly or exponentially and can be the product of an amplification reaction. An amplicon can be double-stranded or single-stranded, and can include the separated component strands obtained by denaturing a double-stranded amplification product. In certain embodiments, the amplicon of one amplification cycle can serve as a template in a subsequent amplification cycle. Exemplary amplification techniques include, but are not limited to, PCR or any other method employing a primer extension step. Other nonlimiting examples of amplification include, but are not limited to, ligase detection reaction (LDR) and ligase chain reaction (LCR). Amplification methods can comprise thermal-cycling or can be performed isothermally. In various embodiments, the term “amplification product” and “amplified sequence” includes products from any number of cycles of amplification reactions.

[0098] As used herein, the “polymerase chain reaction” or PCR comprises amplification of a nucleic acid consisting of an initial denaturation step which separates the strands of a double stranded nucleic acid sample, followed by repetition of (i) an annealing step, which allows amplification primers to anneal specifically to positions flanking a target sequence; (ii) an extension step which extends the primers in a 5′ to 3′ direction thereby forming an amplicon polynucleotide complementary to the target sequence, and (iii) a denaturation step which causes the separation of the amplicon from the target sequence (Mullis et al., EDS, The Polymerase Chain Reaction, BirkHauser, Boston, Mass. (1994)). Each of the above steps may be conducted at a different temperature, preferably using an automated thermocycler (Applied Biosystems LLC, a division of Life Technologies Corporation, Foster City, Calif.). If desired, RNA samples can be converted to DNA/RNA heteroduplexes or to duplex cDNA by methods known to one of skill in the art. PCR methods may also include reverse transcriptase-PCR and other reactions that follow principles of PCR.

[0099] An “amplified polynucleotide” may be a SNP-containing nucleic acid molecule whose amount has been increased at least two fold by any nucleic acid amplification method performed in vitro as compared to its starting amount in a test sample. In some embodiments, an amplified polynucleotide may be the result of at least ten fold, fifty fold, one hundred fold, one thousand fold, or even ten thousand fold increase as compared to its starting amount in a test sample. In a typical PCR amplification, a polynucleotide of interest is often amplified at least fifty thousand fold in amount over the unamplified genomic DNA, but the precise amount of amplification needed for an assay depends on the sensitivity of the subsequent detection method used.

[0100] Generally, an amplified polynucleotide is at least about 16 nucleotides in length. More typically, an amplified polynucleotide is at least about 20 nucleotides in length. In some embodiments, an amplified polynucleotide is at least about 30 nucleotides in length and may be at least about 32, 40, 45, 50, or 60 nucleotides in length. In some embodiments, an amplified polynucleotide is at least about 100, 200, or 300 nucleotides in length. While the total length of an amplified polynucleotide may be as long as an exon, an intron or the entire gene where an SNP of interest resides, an amplified product is typically no greater than about 1,000 nucleotides in length (although certain amplification methods may generate amplified products greater than 1000 nucleotides in length). More preferably, an amplified polynucleotide is not greater than about 600 nucleotides in length. It is understood that irrespective of the length of an amplified polynucleotide, an SNP of interest may be located anywhere along its sequence.

[0101] In some embodiments, methods of the disclosure may comprise: isolating a nucleic acid from a sample suspected of having a S. enterica strain and/or a sample from which one desires to detect and/or identify a specific S. enterica strain; hybridizing one or more SNP comprising regions of the nucleic acid from the sample using one or more probes, each probe designed to bind specifically to a region comprising an SNP; and detecting the hybridized probe-nucleic acid complex. Probes used may be labeled to enable detection. Multiplex hybrid detection maybe enable by using differentially labeled probes. Other detection methods may comprise size analysis of the hybridized product; sequencing an amplified product; hybridization with a probe; 5′ nuclease digestion; single-stranded conformation polymorphism; and/or allele specific hybridization. These and other methods of detecting probes and identifying nucleic acids bound to probes are known to one of skill in the art in light of this disclosure and may be used.

[0102] In some embodiments, probes used for hybridization and/or for detection of amplified products comprising a SNP may comprise the nucleic acid sequence of SEQ ID NO: 158-209, and/or SEQ ID NO: 210-261 and/or labeled derivatives thereof. For example, as shown in Table 3, probes 1 labeled with FAM-MGB and/or probes 2 labeled with VIC-MGB may be used to identify the allele of the corresponding SNP in the same row. Thus for example, a probe having SEQ ID NO: 158 may be used to hybridize to one allele of a SNP comprised in SEQ ID NO: 1, a probe having SEQ ID NO: 210 may be used to hybridize to the other allele of the SNP comprised in SEQ ID NO: 1. In some embodiments, both probes may be used. For example a first probe labeled with a first label may be used to hybridize to one allele of a SNP and a second probe labeled with a second label may be used to hybridize to the other allele of a SNP. In an example embodiment, a first probe may have SEQ ID NO: 158 and a second probe may have SEQ ID NO: 210 and this set of probes may be used to hybridize to and detect a SNP comprised in SEQ ID NO 1.

[0103] The terms “reporter probe” and “probe” are used interchangeably and refer to a detectable sequence of nucleotides or a detectable sequence of nucleotide analogs operable to specifically anneal with a corresponding amplicon, such as but not limited to, a target nucleic acid sequence and/or a PCR product and is further operable to be detected or identified. Reporter probes or probes may be detectable by a variety of methods, including but not limited to, detecting color, detecting radiation, fluorescence, luminescence, emitted wavelengths. In some embodiments, detecting a change in intensity, a change in radiation, a change in an emitted wavelength, a change in fluorescence, a change in luminescence, or a change in color or intensity of color may be used to identify and/or quantify a corresponding amplicon or a target polynucleotide. In one exemplary embodiment, by indirectly detecting an amplicon from a sample or processed sample, one can determine that a microorganism having a corresponding target sequence is present in a sample. Most reporter probes can be categorized based on their mode of action, for example but not limited to: nuclease probes, including without limitation TaqMan® probes; extension probes including without limitation scorpion primers, Lux™ primers, Amplifluors, and the like; and hybridization probes including without limitation molecular beacons, Eclipse probes, light-up probes, pairs of singly-labeled reporter probes, hybridization probe pairs, and the like. In certain embodiments, reporter probes may comprise an amide bond, an LNA, a universal base, and/or combinations thereof, and may include stem-loop and/or stem-less reporter probe configurations. Certain reporter probes may be singly-labeled, while other reporter probes are doubly-labeled. Dual probe systems that comprise FRET between adjacently hybridized probes are within the intended scope of the term reporter probe. In certain embodiments, a reporter probe may comprise a fluorescent reporter group and a quencher (including without limitation dark quenchers and fluorescent quenchers). Some non-limiting examples of reporter probes include TaqMan® probes; Scorpion probes (also referred to as scorpion primers); Lux™ primers; FRET primers; Eclipse probes; molecular beacons, including but not limited to FRET-based molecular beacons, multicolor molecular beacons, aptamer beacons, PNA beacons, and antibody beacons; labeled PNA clamps, labeled PNA openers, labeled LNA probes, and probes comprising nanocrystals, metallic nanoparticles and similar hybrid probes (see, e.g., Dubertret et al., Nature Biotech., 19:365-70, 2001; Zelphati et al., BioTechniques 28:304-15, 2000). In certain embodiments, reporter probes may further comprise minor groove binders including but not limited to TaqMan® MGB probes and TaqMan® MGB-NFQ probes (both from Applied Biosystems). In certain embodiments, reporter probe detection may comprise fluorescence polarization detection (see, e.g., Simeonov and Nikiforov, Nucl. Acids Res. 30:E91, 2002).

[0104] “Hybridization” refers to a process in which single-stranded nucleic acids with complementary or near-complementary base sequences interact to form hydrogen-bonded complexes called hybrids. Hybridization reactions are sensitive and selective. In vitro, the specificity of hybridization (i.e., stringency) is controlled by factors such as the concentrations of salt or formamide in prehybridization and hybridization solutions and by the hybridization temperature. In some embodiments, stringency may be increased by reducing the concentration of salt, increasing the concentration of formamide, and/or by raising the hybridization temperature. For example, high stringency conditions could occur at about 50% formamide at 37° C. to 42° C. Reduced stringency conditions could occur at about 35% to 25% formamide at 30° C. to 35° C. Some examples of stringency conditions for hybridization are also described in Sambrook, J., 1989, Molecular Cloning A Laboratory Manual, Cold Spring Harbor Laboratory Press, Cold Spring Harbor, N.Y. Generally, the temperature for hybridization is about 5-10° C. less than the melting temperature (Tm) of a hybrid nucleic acid.

[0105] As used herein, the term “homology” refers to a degree of complementarity at the nucleic acid level that can be determined by known methods, e.g. computer-assisted sequence comparisons (Basic local alignment search tool, S. F. Altschul et al., J. Mol. Biol. 215 (1990), 403 410). The term “homology” known to the skilled person describes the degree to which two or more nucleic acid molecules are related, this being determined by the concordance between the sequences. The percentage of “homology” is obtained from the percentage of identical regions in two or more sequences, taking into account gaps or other sequence peculiarities. The homology of nucleic acid molecules which are related to one another can be determined with the aid of known methods. As a rule, special computer programs with algorithms which take account of the particular requirements are employed. There can be partial homology or complete homology (i.e., identity). A partially complementary sequence that at least partially inhibits a completely complementary sequence from hybridizing to a target nucleic acid is referred to using the functional term “substantially homologous.”

[0106] The term “selectively hybridize” and variations thereof means that under appropriate stringency conditions, a given sequence (for example, but not limited to, a primer) anneals with a second sequence comprising a complementary string of nucleotides (for example but not limited to a target flanking sequence or a primer-binding site of an amplicon), but does not anneal to undesired sequences, such as non-target nucleic acids or other primers. Typically, as the reaction temperature increases toward the melting temperature of a particular double-stranded sequence, the relative amount of selective hybridization generally increases and mis-priming generally decreases. In this specification, a statement that one sequence hybridizes or selectively hybridizes with another sequence encompasses situations where the entirety of both of the sequences hybridize to one another and situations where only a portion of one or both of the sequences hybridizes to the entire other sequence or to a portion of the other sequence.

[0107] Methods of the disclosure as described above may be adapted to a number of assay formats may be designed for genotyping using the identified SNPs, and these may include assays such as but not limited to: a 5′ nuclease assays (e.g., a TaqMan assay, an embodiment of which is described in the section titled Examples); a high resolution melting (HRM) analysis; a molecular beacon assay; a microarray hybridization; a primer extension assay (e.g., SNaPshot); and a oligonucleotide ligation assay (OLA; e.g., SNPplex).

### Applications of the SNP Panel

[0108] The panel of SNPs described here may be developed into assays as described above, and used in a variety of applications to characterize the serotype or subtype of a Salmonella strain that has been isolated. These applications may include: routine Salmonella strain typing; food testing, environmental testing, clinical microbiology testing, veterinary microbiology testing, and/or outbreak source tracking.

[0109] A variety of samples may be tested for identifying Salmonella serovars and strains for these applications and may include samples such as but not limited to food samples, environmental samples, clinical samples, industrial samples, laboratory samples, air samples, water samples.

### Kits

[0110] Also provided are kits comprising SNP detection reagents. Kits of the present disclosure may be employed for detection and/or differential detection and/or identification of S enetrica strains. A kit of the disclosure may comprise one or more isolated nucleic acid sequences of the disclosure as set forth herein. Some nucleic acid compositions of the disclosure may comprise primers for amplification of target nucleic acid sequences comprising one or more SNPs that are specific to one or more strains of a S. enterica that may be present in a sample. Some nucleic acid compositions of the disclosure may comprise probes for the detection of target nucleic acid sequences and/or amplified target nucleic acid regions comprising one or more SNPs from a S. enterica strain present in a sample. Probes and primers comprised in kits may be labeled.

[0111] Kits may additionally comprise one or more components such as, but not limited to: buffers, enzymes, nucleotides, salts, reagents to process and prepare samples (e.g., reagents to isolate nucleic acids), probes, primers, agents to enable detection and control nucleotides and reagents and/or platforms for nucleic acid sequencing to identify and/or determine SNPs.

[0112] A kit may further comprise reagents for downstream processing of an isolated nucleic acid and may include without limitation at least one RNase inhibitor; at least one cDNA construction reagents (such as reverse transcriptase); one or more reagents for amplification of RNA, one or more reagents for amplification of DNA including primers, reagents for purification of DNA, probes for detection of specific nucleic acids.

[0113] Each component of a kit of the disclosure may be packaged individually or together in various combinations in one or more suitable container means. A container means may generally comprise at least one vial, test tube, flask, bottle, syringe or other container means, into which a component may be placed, and preferably, suitably aliquoted. Where there are more than one component in a kit they may be packaged together if suitable or the kit will generally contain a second, third or other additional container into which the additional components may be separately placed. However, in some embodiments, certain combinations of components may be packaged together comprised in one container means. A kit can also include a means for containing the DNA/RNA, and any other reagent containers in close confinement for commercial sale. Such containers may include injection or blow-molded plastic containers into which the desired vials are retained.

[0114] Some components of a kit are provided in one and/or more liquid solutions. Liquid solution may be non-aqueous solution, an aqueous solution, and may be a sterile solution.

[0115] Components of the kit may also be provided as dried powder(s). When reagents and/or components are provided as a dry powder, the powder can be reconstituted by the addition of a suitable solvent. It is envisioned that a suitable solvent may also be provided in another container means. Kits may also comprise a container means for containing a sterile, pharmaceutically acceptable buffer and/or other diluent.

[0116] A kit of the disclosure may also include instructions for employing the kit components and may also have instructions for the use of any other reagent not included in the kit. Instructions can include variations that can be implemented.

[0117] The section headings used herein are for organizational purposes only and are not to be construed as limiting the subject matter described in any way. All literature and similar materials cited in this application including, but not limited to, patents, patent applications, articles, books, treatises, and internet web pages, regardless of the format of such literature and similar materials, are expressly incorporated by reference in their entirety for any purpose. In the event that one or more of the incorporated literature and similar materials defines or uses a term in such a way that it contradicts that term's definition in this application, this application controls. While the present teachings are described in conjunction with various embodiments, it is not intended that the present teachings be limited to such embodiments. On the contrary, the present teachings encompass various alternatives, modifications, and equivalents that will be appreciated by those of skill in the art in light of these teachings.

### EXAMPLES

[0118] Aspects of the present teachings can be further understood in light of the following examples, which should not be construed as limiting the scope of the present teachings in any way.

### Example 1

### TaqMan SNP Genotyping Assays

[0119] A number of assay formats may be used for genotyping SNPs described herein. In one example embodiment, a TaqMan SNP genotyping assay was performed. Using proprietary Taqpipe software, two-dye SNP genotyping assays were designed. These assays were successfully validated in the laboratory by running the assays in microtiter plate format against a panel of six strains, the genomes of which were used in identification of the SNP panel. Results were as expected.

[0120] In some embodiments, one or more genotyping assays of the disclosure may be run using the 52 SNP panel described herein on a collection of commonly encountered Salmonella serotypes, and a validated database of SNP profiles observed for each of these serotypes may be established. While analyzing a sample to test for the presence of one or more Salmonella serotypes, 52 SNP TaqMan assays may be performed and the assays may be loaded into a multiwall format plate (such as an OpenArray plate) so that a number of strains may be analyzed, in parallel, against all of the 52 SNP assays.

[0121] Prior to serotype testing, the strains to be tested will typically be cultured, and genomic DNA isolated. These DNA templates would be added to a multiwell format (such as an OpenArray slide), and run through a DNA amplification method (such as a thermal cycling protocol) and an endpoint fluorescence protocol. A software tool may be used to automate the allele calling for each SNP assay, and thereby an entire 52-SNP profile may be obtained. This 52-SNP profile may be searched against the database of validated Salmonella serotypes in order to identify high confidence matches that would identify the serotype of the strain being tested.

### Example 2

### Additional SNP Identification and Increasing SNP Panel Repertoire

[0122] As described earlier, the present inventors manually selected distinguishing SNPs for very closely related strains. For example 4 SNPs were manually selected for distinguishing between S. Enteritidis and S. Gallinarum; between S. Paratyphi C; and S. Choleraesuis; and between S. Johannesburg and S. Urbana. Additional SNPs are contemplated to be further identified by manual selection and/or other selection criteria for other closely related strains, which is expected to incrementally add new SNP markers to a SNP panel for serovar/strain identification assays.

### Example 3

### Association of SNPs with Serotype Determining Loci

[0123] The present inventors also contemplate associating one or more identified SNPs with a serotype determination loci. For example, a SNP may be located with a serotype determining locus such as with a flagellar genes, or O-antigen biosynthetic genes. For this, the profile of each known reference serotype will be correlated with each SNP profile. In some embodiments, this may comprise typing several (e.g., thousands) of Salmonella strains from large reference collections in order to establish a validated database of serotype profiles and correlating them with a SNP profiles database to allow serotype determination.

[0124] However, in some embodiments, strains that are closely related by SNP profile do not necessarily have similar serotypes: for example, Urbana (30:a:e,n,x) and Johannesburg (1,40:b:e,n,x) are antigenically distinct, but very similar by core SNP profile. This may be due to factors such as antigenic switching by recombination at the antigen determining loci.

TABLE 1
S. enterica Strains employed

| | | | | | Used for |
|---|---|---|---|---|---|
| | | Genbank | Sequence | Used for SNP | SNP |
| Serovar | Strain | accession | source | identification | validation |
| 4-5-12:i:— | CVM23701 | ABAO00000000 | Genbank | no | yes |
| Adelaide | A4-669 | AFCI00000000 | Internal sequencing | yes | yes |
| Agona | SL483 | CP001138 | Genbank | yes | yes |
| Alachua | R6-377 | AFCJ00000000 | Internal sequencing | yes | yes |
| Baildon | R6-199 | AFCK00000000 | Internal sequencing | yes | yes |
| Choleraesuis | SC-B67 | AE017220 | Genbank | yes | yes |
| Dublin | CT_02021853 | CP001144 | Genbank | yes | yes |
| Enteritidis | P125109 | AM933172 | Genbank | yes (reference) | yes |
| Gallinarum | 287/91 | AM933173 | Genbank | yes | yes |
| Gaminara | A4-567 | AFCL00000000 | Internal sequencing | yes | yes |
| Give | S5-487 | AFCM00000000 | Internal sequencing | yes | yes |
| Hadar | RI_05P066 | ABFG00000000 | Genbank | no | yes |
| Heidelberg | SL476 | CP001120 | Genbank | yes | yes |
| Heidelberg | SL486 | ABEL00000000 | Genbank | no | yes |
| Hvittingfoss | A4-620 | AFCN00000000 | Internal sequencing | yes | yes |
| Inverness | R8-3668 | AFCO00000000 | Internal sequencing | yes | yes |
| Javiana | GA_MM04042433 | ABEH00000000 | Genbank | no | yes |
| Johannesburg | S5-703 | AFCP00000000 | Internal sequencing | yes | yes |
| Kentucky | CDC191 | ABEI00000000 | Genbank | no | yes |
| Kentucky | CVM29188 | ABAK00000000 | Genbank | no | yes |
| Minnesota | A4-603 | AFCQ00000000 | Internal sequencing | yes | yes |
| Mississippi | A4-633 | AFCR00000000 | Internal sequencing | yes | yes |
| Montevideo | S5-403 | AFCS00000000 | Internal sequencing | yes | yes |
| Newport | SL254 | CP001113 | Genbank | yes | yes |
| Newport | SL317 | ABEW00000000 | Genbank | no | yes |
| Paratyphi A | ATCC 9150 | CP000026 | Genbank | yes | yes |
| Paratyphi A | AKU_12601 | FM200053 | Genbank | yes | yes |
| Paratyphi B | SPB7 | CP000886 | Genbank | yes | yes |
| Paratyphi C | RKS4594 | CP000857 | Genbank | yes | yes |
| Rubislaw | A4-653 | AFCT00000000 | Internal sequencing | yes | yes |
| Saintpaul | SARA23 | ABAM00000000 | Genbank | no | yes |
| Saintpaul | SARA29 | ABAN00000000 | Genbank | no | yes |
| Schwarzengrund | CVM19633 | CP001127 | Genbank | yes | yes |
| Schwarzengrund | SL480 | ABEJ00000000 | Genbank | no | yes |
| Senftenberg | A4-543 | AFCU00000000 | Internal sequencing | yes | yes |
| Tennessee | CDC07- | ACBF00000000 | Genbank | no | yes |
| | 0191 | | | | |
| Typhi | Ty2 | AE014613 | Genbank | yes | yes |
| Typhi | CT18 | AL513382 | Genbank | yes | yes |
| Typhimurium | LT2 | AE006468 | Genbank | yes | yes |
| Typhimurium | 14028S | CP001363 | Genbank | yes | yes |
| Typhimurium | D23580 | FN424405 | Genbank | yes | yes |
| Typhimurium | SL1344 | FQ312003 | Genbank | yes | yes |
| Uganda | R8-3404 | AFCV00000000 | Internal sequencing | yes | yes |
| Urbana | R8-2977 | AFCW00000000 | Internal sequencing | yes | yes |
| Virchow | SL491 | ABFH00000000 | Genbank | no | yes |
| Wandsworth | A4-580 | AFCX00000000 | Internal sequencing | yes | yes |
| Weltevreden | HI_N05- | ABFF00000000 | Genbank | no | yes |
| | 537 | | | | |

TABLE 2
52 SNPs, shown in lowercase, with flanking sequences of 100
nucleotides on both sides. Coordinates refer to S. Enteritidis genome

| | Flanking | Flanking | | |
|---|---|---|---|---|
| SNP | left | right | | SEQ ID |
| coordinate | coordinate | coordinate | Sequence | NO |
| 104534 | 104434 | 104634 | TGATCGGCGACGGCTTAAGCAGAATATGACGAGCGTGAACTTCGGTCACGGAGATACTCTGGC | SEQ ID |
| | | | TCTGACCGCGCAGGTCGTTTACTTTCAGAATGTGGAAaCCGACGCCGGAGCGAATCGGGCCGA | NO: 1 |
| | | | CAATGTCGCCTTTCTTCGCGGTGCTCAGCGCCTGGGCGAAAATCCCCGGCAGCTCCTGGATAC | |
| | | | GGCCCCAGCCCA | |
| 104819 | 104719 | 104919 | CAATGCTTTCCGCCTGGCGCTGTGCGTCGTTAACCTGCTCGGAGGTTGGGTTTTCCGGCAGAG | SEQ ID |
| | | | CAATCAGGATATGGCTCAGGTTCAGCTCGGTGCTGGCgTCGTTTTGGGTGCCAATCTGTTTTG | NO: 2 |
| | | | CCAGCGCGTCAACTTCTTGCGGCAAAACGGTGATACGGCGACGAACCTCGTTGTTGCGCACTT | |
| | | | CAGAGATAATCA | |
| 141238 | 141138 | 141338 | GAAGCTGCCACTCTGCTTGTTCATTTGCATCATTTTAACGGCGGTGACGGTGGTCACGACGGC | SEQ ID |
| | | | GCACCATACTCGTTTACTCACCGCGCAGCGTGAACAAtTGGTTCTGGAGCGCGATGCATTGGA | NO: 3 |
| | | | CATTGAATGGCGCAACCTGATCCTTGAAGAAAATGCGCTAGGCGATCACAGCCGGGTGGAGCG | |
| | | | GATCGCAACGGA | |
| 343457 | 343357 | 343557 | GCTATTTCGCGCCGCGCGGTATCGCGATGTTAACGCTTGATATGCCTTCGGTTGGATTTTCAT | SEQ ID |
| | | | CAAAGTGGAAATTAACCCAGGATTCCAGCTTGCTCCAcCAGCATGTGTTAAAAGCGCTTCCTA | NO: 4 |
| | | | ATGTTCCCTGGGTGGATCATACCCGTGTTGCGGCGTTTGGTTTCCGTTTTGGCGCCAATGTTG | |
| | | | CGGTGCGTCTGG | |
| 579050 | 578950 | 579150 | AGCCGCGTGCGACGCACCATATTCAGGAAATTATCGAGCTCACCCGCACCTTAATCGAGAAAG | SEQ ID |
| | | | GACACGCCTATGTGGCGGATAACGGCGATGTGATGTTCGATGTACCGACCGATCCGACTTATG | NO: 5 |
| | | | GGCAGCTTTCCCGTCAGGATCTTGAGCAGCTTCAGGCGGGCGCGCGCGTAGATGTCGTTGACG | |
| | | | TGAAGCGTAACC | |
| 680692 | 680592 | 680792 | ACGAACGGTACACTTTCGTGCTGATAGGATAGATGTCATGGCCCGGAATCAATACCGAGGCAT | SEQ ID |
| | | | TGACGGTCATCACCATCTGATATTCCGCCGTCTGGCCgTCCTGGAACACTGACGCCGTATCCT | NO: 6 |
| | | | GCGAAATAGTCACCGTTCCAAGCCGCAGAGACGGAACGTCTTTGCGCGTTGTGTCTTTATCAA | |
| | | | GCAAGTTTACGT | |
| 869374 | 869274 | 869474 | ATTCGAAATAAATTTGTGGTTCTGCTCACATTGTTATTAAAATGTTTCTGGTCGCAGTTACAG | SEQ ID |
| | | | CCAGGAGCTTAAGTATGACCGTTAACGTTGTCGTTACcGATATGGACGGCACTTTTCTCGACG | NO: 7 |
| | | | ATGCCAAGCAGTACGATCGTGTACGCTTCATGGCGCAATACCAGGAACTGAAAAAACGTAATA | |
| | | | TCGAATTTGTAG | |
| 869620 | 869520 | 869720 | AGCTGAAAGACGAAATTTCCTTTGTCGCAGAAAATGGCGCGCTGGTGTATGAACATGGCAAGC | SEQ ID |
| | | | AGTTGTTTCACGGGGAGCTAACCCAACATGAATCGCGtATTGTGATTGGCGAACTGCTGAAGG | NO: 8 |
| | | | ATAAGCAACTTAATTTTGTCGCCTGCGGTCTGAAAAGCGCTTATGTCAGCAAAAACGCTCCCG | |
| | | | AGACTTTCGTGG | |
| 872425 | 872325 | 872525 | TTTCTTCACTTACGGAAAAACCTGCGCCGGGCCGGTCTGCCAGGTCGTCGATCTCTTTTTCAA | SEQ ID |
| | | | TCCACGAGACGGTATATTCCGGGAAAATCGGCGCGGCgCGGACTTCACTTGCCTGGTTGCCGA | NO: 9 |
| | | | CGATCAGTTCATCGTGTTTTATCCAGATAGTGCGTTCCGCCAGGTGATGGGCCAGCGCCAGCG | |
| | | | CGCGGCGTACCG | |
| 874018 | 873918 | 874118 | TCGCATCGTACATGACGATTTTTCCGCTAGCGGGCTGACCGTAATGCGCCAGCAGCTTAATGG | SEQ ID |
| | | | CCTCCATTGCCTGTAGCGAACCGATCACGCCAATCAGtGGCGCCATCACCCCTGCCTCTACGC | NO: 10 |
| | | | AGGTCAGAGCGTTTTCGCCAAACAGACGGCTCAGGCAGCGGTAACAGGGTTCGTTTTCCCGAT | |
| | | | ACGTAAAGACGG | |
| 914443 | 914343 | 914543 | GGCAGGATCGCTTTATTCCTAACGCTATACCGGCTGTGGATGTTGCTGCTTTATTACCTTTTT | SEQ ID |
| | | | CGCCGAACGCGGCCACGCTGGGATTCGTCTTTTGTACtTTCGGCACGATTTTTTCCATGGGCA | NO: 11 |
| | | | TCCTGCTGCTCATCCATAGCCCTATTATGGTATTGCCTGGTTTTGTTCCGCTCTTCTTTTCCG | |
| | | | GCGGTCCCATCG | |
| 1085897 | 1085797 | 1085997 | GAACGGCGGCAAGCTGCGTCAACGCGTCCTGTTCGTCATCAGCCAGGCATAATACCCGTTCAC | SEQ ID |
| | | | GCGGCAACAGCGTCCAGGTATTGCGCTCGCCGGTCGGtCCCGGTAGCAGGCGCTGCGTGCCGG | NO: 12 |
| | | | CCTGCGCCAGATCGGCGAATTGTCGGCAGAGCGTCTGTAGCGCCGGGCGATCCGCCGCCCATT | |
| | | | GCGTCAGAGCGG | |
| 1090910 | 1090810 | 1091010 | TGTTTAACCCGTGGATTGCCGGTGTTCTGCTGTCTGCTATCCTGGCGGCGGTGATGTCGACGT | SEQ ID |
| | | | TGAGCTGTCAGTTGCTGGTATGCTCCAGCGCGATTACaGAAGATTTATATAAGGCTTTTCTGC | NO: 13 |
| | | | GTAAAAGCGCCAGCCAGCAAGAGCTGGTATGGGTAGGGCGAGTGATGGTGCTGGTGGTAGCGC | |
| | | | TGATCGCCATTG | |
| 1317814 | 1317714 | 1317914 | CCGCAGGCGCCGCGCTATATCTGGAAGCTTCAGCAGGCGCTGGACGCCATGTAGTTTAGCGTG | SEQ ID |
| | | | AAGATTATTCTCGCACTTTATTCGCTCTTTCTCGGGCcTCGCGCTCAAGCGAAAAAATAATCC | NO: 14 |
| | | | GCTGCAACTCCCGCTCTACCGCCGGGCTGACGTTAAGGAAACGAAAGCTCAGGCGGGGAGTGG | |
| | | | TGATCGTTTCAT | |
| 1341676 | 1341576 | 1341776 | ACCGAACCCGCGAGCGCGCGCAAGCCCTGGCGGATGAGGTAGGCGCTGAGGTTATCTCGCTCA | SEQ ID |
| | | | GCGATATCGACGCCCGCTTGCAGGATGCCGATATTATcATCAGTTCGACCGCCAGCCCGCTGC | NO: 15 |
| | | | CGATTATCGGTAAAGGCATGGTGGAGCGCGCATTAAAAAGCCGTCGCAACCAGCCGATGCTGC | |
| | | | TGGTGGATATCG | |
| 1586827 | 1586727 | 1586927 | GATTAGAGAGCGGCATGACGATCGGGCGAGGGCAATGCTTATGCATCTCGCGGATGATCTCTT | SEQ ID |
| | | | CAGTAAAGAGCCCGGTCTGGCCGGAAACCCCGATCAGgATATCCGGCTTCACGTTACGCACCA | NO: 16 |
| | | | CATCCAGCAGCGACAGCACGTCATTTTCGGTATCCCAGTGCTGGAGATTGTCGCATTTCTGCA | |
| | | | CCAGTTTTGCCT | |
| 1673378 | 1673278 | 1673478 | CCGTAACCTTACGTTCGGCAAGTTTCTCCATTAACCCAGGATTTTGCGCAGGCCAGATAAAAC | SEQ ID |
| | | | TGACCAGCGTAGTCCCGGGGTTCAGTAAAGCGATTTCcTCTTCTTCAGGCGCATTAACCTTGA | NO: 17 |
| | | | GAATAATTTCCGACTGCCAGATAGCATTGCCGTCTACAATATCCGCGCCAGCCTGCGCAAACG | |
| | | | CTTTGTCGTCAA | |
| 2199971 | 2199871 | 2200071 | TCATTAGCACTGCGAACCAGGAAAAATAAATAATCAGCAGATACAATCCATTGTCTATGGTTT | SEQ ID |
| | | | TCCCGACATCCGCACCGTTAAAGATTCCGAATGATGCgACATATTCATAAAGTGAGCCAAATC | NO: 18 |
| | | | TGACTACACCATCAATATGGGTCAAGGAATATCCGACCATGACTAAGGGGCCCACAATACGAT | |
| | | | AATAAGAAGATG | |
| 2207082 | 2206982 | 2207182 | ACATCGCCAGGCCCGACGCGATACTGATAGCTGGCGATCTCCTGGTCCAGCGACATATTCGGT | SEQ ID |
| | | | TGCGCGACATTGGGCCGCGGGCGTAATTGCTCAACCAgCCGTGGCGTCAGCGGATACACATTG | NO: 19 |
| | | | ACCATCCGGTCGAGATCAAAGTCAGCGTCTTGCTGTTTGATCACATCTTTCCCCATCGTAGAC | |
| | | | ATATTGCTGCCC | |
| 2207589 | 2207489 | 2207689 | CGCATTCCCCTCAGATTTTATCCTCGTTCAGATAAAAATCTTCAGCGAAATAAAGGTTACGTA | SEQ ID |
| | | | TTAATAGTTTTCTCGATGTCGTGACAGGATATTTAAGaGCGCTATCTTAATCCTGCAAGAATT | NO: 20 |
| | | | GTTGCAGCTAACCTAATGACAGGCAAGGTAACAAACCCGCCATTCTATATTTTTAAGATTAAT | |
| | | | ATTAAATGAATT | |
| 2243744 | 2243644 | 2243844 | GCGCCTCTTTCAGGGAATATTCAAAGATATTATTGATTTGCGTACCGTAGCCGCGGGCGCGCG | SEQ ID |
| | | | TGACGACCCCCTCTTCTTCCAGCGCCTGCATCGCTTTtCGTACCGTGATGCGCGAGACGCCGG | NO: 21 |
| | | | TAAGCTGGCTGAGATCGCGTTCGCCAGGCAAAATATTACCGTGCTCAAGAATACCGCTGCGCA | |
| | | | CGGCATCCTTTA | |
| 2300257 | 2300157 | 2300357 | TATCGCCCACGTTCAGAACGCCCGCACGCAGTTTAACGTTTTTCGTCGCCTGCCATGCCGCGC | SEQ ID |
| | | | CGGTATCCCAGACCACGTACCCGCCCGGCGTTTTCGCtGTTGCGCTGTCGGCCCGCTTACGCC | NO: 22 |
| | | | CGGTATACTTCCCTGATACGTAGAATGACCAGTCTTCGAGCTGCGCCGGTTTCCAGTCCAGCG | |
| | | | TACCGTTCGCGG | |
| 2302792 | 2302692 | 2302892 | CGCGACGGAAGCGATAATGGCTAATGGCAATCCCCAGCCAGGCGATGAAGCCCGTCATACCGG | SEQ ID |
| | | | AGGTGTTCAACAGCCACAGATAGACCGTCTGGTTGCCaAACATTGAGGTCAAAAAGCAAAGAC | NO: 23 |
| | | | CGGCAATCACGGTGGTGGCATAAAGCGCATTGCGCGGTACGCCGCCGCGGGACAATTTCGCAA | |
| | | | AAATACGCGGGG | |
| 2309364 | 2309264 | 2309464 | TGCATGGACACTGGCTGCGCAGACGCGTCATCCAGTCGGTGAACGCTTCCGGACTCACGCCAG | SEQ ID |
| | | | CCGGTAAGCTACCGCTGACGCAGACCATATCGAACTGgCCCAGCCAGCTCAGGGAGTCGTTAA | NO: 24 |
| | | | CAAAGCGTTCCCAGTCTGCGGGGGTCACGTCAAAGCCGGAAAAGTTGAAGTCGGTCACTTCGC | |
| | | | CATCTTTTTCCG | |
| 2326486 | 2326386 | 2326586 | CAAAACGGCTGTTGATAATCGTCATCACAAACAGAAATACGATGTTCAACGCGAAGTAGTAGC | SEQ ID |
| | | | CGAAATCCTGCGGCGGAACATGATTAATTTCGATATAaACAAACGGCCCCGCGCTCAAAAAAG | NO: 25 |
| | | | AGAACATACCGGCAAAACTAAACCCGCTCGCCAGCATATAGCTCAGTACGCGTTTGTGGCGAA | |
| | | | ACAACGCGGCAA | |
| 2433579 | 2433479 | 2433679 | AATGGCAACGATAAGAAAGATAGCGAATGCCCAGTGATGAGCGATGACTTCAGTGGATGTTGA | SEQ ID |
| | | | CATACTCATTGCTTACTCATCAAAAGTAGCGCCAGTTcCTCTGCTCTTTACGGCAGATGGACG | NO: 26 |
| | | | CCACATCGATTCATGGGGAGGAATAAAAAAAACCCTACAATTACTGTAGAAAATGATAAAAAC | |
| | | | AGCTAATTGATG | |
| 2433757 | 2433657 | 2433857 | ATGATAAAAACAGCTAATTGATGTGGTTTTTTACTCCTTTCTATAACCTTTTGTCAACTTTAA | SEQ ID |
| | | | CAAAAGTTCCTTCACATTAATTTACATCAATTCATCAtCATTAACATTAAGTGCCATCCTGGA | NO: 27 |
| | | | GAAAATGACTCTTCGACCAGGGGGGATTTTATGTTGTTGAATCGTGTCCGTTGTGAAGCAAAA | |
| | | | GAAATAACACAC | |
| 2441456 | 2441356 | 2441556 | TAAGGATTGAAGGCGGCAACGGCGTCACGGAACGTTTCCCTAACCACCATAATCCCTGCATAG | SEQ ID |
| | | | GCAAGCTCAGGGCGAACAGGGCGGTCGCCACGGCCGGaCCTAACTGACCGCCCAGCGCTATCT | NO: 28 |
| | | | GCCAGCATAATGTAAAGACGGCGACAGGCGGCATAAATCGTATGGCATAGCGCGTCATACGAA | |
| | | | TGACGCGGTTTT | |
| 3107015 | 3106915 | 3107115 | CGGACCAGCTCAGCACCTCATCGCGCTGGTCGAGTGGGTGACACCAAACCAGCGAACATCGGC | SEQ ID |
| | | | CATGCGACATCGGCAACATCGCCAGCGGGCCATTGGGaGTAAAACGTTCAAAGGCGCGTCCCT | NO: 29 |
| | | | GATGCGGGATAGCGGTCGCGACATTCGCTATCACCGCTAACTGTTCGTAAGGCTCCTGATGCC | |
| | | | AGTCAACGCCGC | |
| 3144381 | 3144281 | 3144481 | GCAGTAATCAGGTATTCGATGCTGAAATCATTAGCGCCAGTAAGAAAAGCGTTGAAGTGCAAG | SEQ ID |
| | | | TGATGAAAGGCGAAATCGACGATCGTGAATCGCCGCTaCATATCCATCTGGGCCAGGTGATGT | NO: 30 |
| | | | CGCGCGGTGAAAAAATGGAATTTACTATCCAGAAATCGATCGAACTAGGTGTAAGCCTCATTA | |
| | | | CGCCACTGTTCT | |
| 3151178 | 3151078 | 3151278 | CTAAACTACCGCCGCTCAGTCTTTATATTCATATTCCCTGGTGTGTACAAAAATGTCCATATT | SEQ ID |
| | | | GCGACTTCAATTCCCATGCGTTGAAGGGCGAGGTGCCaCATGACGACTACGTCCAGCATCTGT | NO: 31 |
| | | | TAAACGATCTGGATGCCGACGTCGCTTGGGCGCAAGGGCGTGAAGTAAAGACCATTTTTATTG | |
| | | | GCGGCGGTACGC | |
| 3151680 | 3151580 | 3151780 | GGACCAAACGCTGGAAGAGGCGCTGAATGATTTGCGACAGGCAATTGCGCTTAATCCGCCGCA | SEQ ID |
| | | | TCTCTCATGGTATCAATTGACGATTGAACCCAACACTcTGTTCGGTTCGCGTCCGCCGGTTTT | NO: 32 |
| | | | ACCGGACGATGACGCTCTGTGGGATATCTTTGAGCAGGGCCACCAGTTATTAACCGCCGCGGG | |
| | | | CTATCAGCAATA | |
| 3355747 | 3355647 | 3355847 | TTCTTGCCGGTTGTACGCCTGAGCAAGAGAAAGGGTTGCAGGACTATGGCCGCTACCTTGGTA | SEQ ID |
| | | | CGGCTTTCCAGCTCATTGACGATCTGCTGGATTACAGtGCCGACGGCGAGCATCTCGGTAAAA | NO: 33 |
| | | | ATGTGGGTGATGACCTCAATGAGGGCAAACCTACCTTACCGTTGCTTCACGCCATGCGCCACG | |
| | | | GTACGCCAGAAC | |
| 3425000 | 3424900 | 3425100 | TGTACTGCCCCAGCATCAGCAGGTCGCTGTTTTTTAGCAGTAATTCCTGGCGCAGCGCCCGAT | SEQ ID |
| | | | TTTCCAGCTCAAGCTGGTCGCGAGAAGCCAGCGTTTGcGACACGCTGTCGAGCAGTTCACGAG | NO: 34 |
| | | | GGCCGTTTGAAATAAAATAGAAAGGACTGACGGCAGTGTCCATGTACGTTCGGATTTGACTGA | |
| | | | ACGTCCCCAGGC | |
| 3498114 | 3498014 | 3498214 | TGGCTGTCGGTTTATTGATAGGCCAGCTACACCTGGGCTTGCTTTTCTCTCTCGTTCCCGCCT | SEQ ID |
| | | | GCTGCAACATTGCAGGTCTGGATACCCCGCACAAACGtTTTTTTAAACGCCTGATCATCGGCG | NO: 35 |
| | | | CGTCGCTGTTCGCCGGATGCAGTCTGGTAACGCAACTTCTGCTGGCGGAATCCATCCCCCTGC | |
| | | | CGTTGATCCTGA | |
| 3501524 | 3501424 | 3501624 | TACTTTCCGGGTGGAACTGCACGCCTTCCAGATCCCACTCGCGGTGGCGAATGCCCATAATCT | SEQ ID |
| | | | CCTGCGTTTCGCTCCAGGCGGTGATCTCAAAACACTCaGGCAACGTGGCAGGGTCGACAATCA | NO: 36 |
| | | | GCGAGTGGTAACGTGTCACGGTTAACGGGCTGGGCAATCCCCGAAACACGCCCTGTCCATTAT | |
| | | | GCGTAACAGGTG | |
| 3776636 | 3776536 | 3776736 | CAAGCATCATGCCAAAACGACGGTTGCGCGACTGGTTGTCGGTACAGGTCAGCACCAGATCGC | SEQ ID |
| | | | CTAAACCCGCCATCCCCATAAAGGTGGCGGGATCGGCaCCAAGCGCTGCGCCAAGCCGCGACA | NO: 37 |
| | | | TTTCGGTCAGTCCACGCGTGATTAGCGCCGTGCGGGCGTTCGCGCCGAAGCCGATGCCGTCAG | |
| | | | ACATCCCCGCGC | |
| 3778064 | 3777964 | 3778164 | TGATCATCTCTTCACGCTTCACGGCGTCGCCGTCAATCGCAATTTCCTGGAAACTCACGCCCT | SEQ ID |
| | | | TGCTGTTTAACAGCGCCTTTGCACGATGGCAAAACGGgCAGGTTGCTTTGGTGTAGATTTCAA | NO: 38 |
| | | | TATTGGCCATGACTTCGCTCCTGTTTTTTTACCCGATGGATTTCATGTCGACGCAAAGGCAAG | |
| | | | TCATTCCCCTTG | |
| 3866852 | 3866752 | 3866952 | ACCGCGGCTGTTTTGTATTTTCAATCCTTCCACGCCGCTGGCGTAACGAAACGCCGTAACCGT | SEQ ID |
| | | | AAAATCGTCATTTTCCAGCAAGATACGCGGCTGCTCGcTAAAAAGCTCCCGCCATAATGTAAT | NO: 39 |
| | | | ACGTATTGTCATGGTTGATCTCCTCAGGACGCGGCGACTTCAGCCAGGTTGCCGCGCACTTTG | |
| | | | CTTTCGCGCCAG | |
| 3867081 | 3866981 | 3867181 | GCATGGAAACCAGGAATGAGAGCTGTAGCGAGTGGAACATGTCCGCCACGTAGCCCTGAATCG | SEQ ID |
| | | | CGGGAACCACCGCCGCGCCGACAATCGCCATCACGATgACCGCCCCCGCCATTTCGGTATGCT | NO: 40 |
| | | | CGTTATCGACGGTATCGAGCGTTCCGGCATAAATGGTCGCCCAGCAGGGGCCAAACAGAACAC | |
| | | | TGACCAGCACCG | |
| 4002077 | 4001977 | 4002177 | GTGATGCTGGTCGATCACGACGAATTTAAAGCGATTCCCGGCGATGCGGTTCATCAACGTTAT | SEQ ID |
| | | | GTGGTTGATACCAAAGGAGTCTGGCGCTGATGAAACGcATTCTGGTGACCGGAGGCGCAGGCT | NO: 41 |
| | | | TTATCGGATCTGCGGTGGTGCGGCATATCATCCATGAAACGGCAGACGCGGTGGTGGTGGTGG | |
| | | | ATAAACTCACCT | |
| 4129096 | 4128996 | 4129196 | ATGAGCGCCCATACAGAATTACCCGCGGCGATCTGTTTTACATTCGTGCTGAAGACAAACACT | SEQ ID |
| | | | CCTATACCTCCGTTAACGATCTGGTGCTGCAAAATATcATTTACTGCCCGGAGCGTTTGAAAC | NO: 42 |
| | | | TCAATGTAAACTGGCAGGCGATGATTCCCGGCTTTCAGGGAGCGCAGTGGCATCCTCACTGGC | |
| | | | GGCTGGGCAGTA | |
| 4129999 | 4129899 | 4130099 | ACTGCAAATACCACATCAGACCGCCAAGCGCGGACAGCAGAATATTGCTGATAATCAACGGTC | SEQ ID |
| | | | TTGCCAGCGAGAAGTCGGCTTTTATCGACAGATTTTGtACTTTTGCCAGGCGGATAAAACAGA | NO: 43 |
| | | | AACCGAGGTTAACCAGCGCGCCGCCGCCCATAATCACCACGTAACTCGGCAGCGCGACATAGA | |
| | | | GCGGGTCAACGC | |
| 4191971 | 4191871 | 4192071 | GCTGAGATATGAGCACGACCGACGATACCCATAACACGTTATCCACTGGAAAATGTCCTTTCC | SEQ ID |
| | | | ATCAGGGGGGGCATGACCGAAGCGCAGGCGCAGGGACtGCCAGCCGCGACTGGTGGCCGAACC | NO: 44 |
| | | | AGCTTCGCGTGGATCTTTTGAATCAACATTCCAACCGTTCTAACCCGCTGGGTGAAGACTTTG | |
| | | | ACTACCGCAAAG | |
| 4206466 | 4206366 | 4206566 | AGGTTTTATACCCGGCCTGTTTCATCATATTCATCAGCGATGGCTTCGTCAGATACCAGTCCG | SEQ ID |
| | | | GGTTCTTTTCGTCCGCGAACGTTAGCGCCTGTTGCAGgATCTCAATGGTGTACGGTCGCGAAG | NO: 45 |
| | | | TTACCACATTATTAAACACGGTCAGCCCGGGGTCGGTTTTATGCAGCGCGTCCAGTTCCGGCG | |
| | | | TGGTTTCGCGCG | |
| 4206625 | 4206525 | 4206725 | CGGTTTTATGCAGCGCGTCCAGTTCCGGCGTGGTTTCGCGCGGATAACCGTACAGACTCATAC | SEQ ID |
| | | | GGCCACGCTGGGTCGATTCGCCAATCACCAGTACCAGtGTGCGCGGCGCATCGCCGGAGTGGT | NO: 46 |
| | | | CCTGGAAGTTAGCCAGCGGCGGCAGGGCATCGTTTTCATTCAGCAGTTTATTCAGCGAGGCGA | |
| | | | GCTGTAAACGGT | |
| 4207216 | 4207116 | 4207316 | CAATAACGGCCGCAATAACCCGGATGCGGCCTGGAAACAGAAAGACCGGGATCAGCCACAGTG | SEQ ID |
| | | | AGCTGTACAGTAGCGAATCCCGCAGACCGTTTGTCCCgCTGTATCCGGTGAGATAAATAATGG | NO: 47 |
| | | | CCTGCAGGAGGGTGGAAAAGAACCAAAAGTAGAGCAGTGCCCAGCCCAGGGCTTTCCAGCTAA | |
| | | | ACGCGGGTTTAG | |
| 4207666 | 4207566 | 4207766 | TACCGGCGGCGACGCCCGCAATCGTGACCATCAACGCCTGTTCGACGCGAGGATCGGGCGATT | SEQ ID |
| | | | TGCCCTGCTCTTCAGTCAGACGGGAACGATACAGCAAcTCGGCCTGCAACACGTTTAATGGAT | NO: 48 |
| | | | CGGTATAAACGTTTCTTAACTGAATGGACTCCGCAATCCACGGTAAGTCGGCCATCAGGTGCG | |
| | | | AATCGTTGGCAA | |
| 4240670 | 4240570 | 4240770 | AGCGTGTTGTCCAGGAAGACCGTTTCACCACCATCCACATTCAGGAACTGGCGTGCGTGTCCC | SEQ ID |
| | | | GTGACACCAAGCTGGGGCCGGAAGAGATCACCGCTGAcATCCCGAACGTGGGTGAAGCTGCGC | NO: 49 |
| | | | TCTCCAAACTGGATGAATCCGGTATCGTTTACATTGGCGCGGAAGTGACCGGCGGCGACATTC | |
| | | | TGGTCGGTAAGG | |
| 4244367 | 4244267 | 4244467 | ATATCTGGGCTGCGGCGAACGATCGTGTATCTAAAGCGATGATGGATAACCTGCAAACTGAAA | SEQ ID |
| | | | CCGTGATTAACCGTGACGGCCAGGAAGAGCAGCAGGTcTCCTTCAACAGCATCTACATGATGG | NO: 50 |
| | | | CCGACTCCGGTGCGCGTGGTTCTGCGGCACAGATTCGTCAGCTTGCTGGTATGCGTGGTCTGA | |
| | | | TGGCGAAGCCGG | |
| 4245891 | 4245791 | 4245991 | AATGGCGTCAGCTCAACGTGTTCGAAGGGGAACGTGTAGAACGTGGTGATGTGATTTCCGACG | SEQ ID |
| | | | GTCCGGAAGCGCCGCACGATATTCTGCGTCTGCGTGGtGTTCATGCTGTGACGCGTTACATCG | NO: 51 |
| | | | TTAACGAAGTCCAGGATGTATACCGTCTGCAGGGCGTTAAGATTAACGATAAACACATCGAAG | |
| | | | TTATCGTTCGTC | |
| 4372200 | 4372100 | 4372300 | GGAGGTATAAAGGATAAACAGCGGATCTTCGGCATTCATCGCTTCAGGCTGGTGCTCAGGGCT | SEQ ID |
| | | | GGCTTTTTCAATCAAATCGCGCCACCACAGGTCGCGGcCTTCTTGCCAGTCAATGTCGCTGTC | NO: 52 |
| | | | GGTGCTCTTCAGGACGATCACATGCTCAACGCTAGTGACATTCGGGTTTTTCAGCGCGTCATC | |
| | | | GACATTCTTTTT | |

TABLE 3
Primer and probe sequences. Coordinates refer to S. Enteritidis genome.

| S. Enteritidis | Forward | Reverse | Probe 1 | Probe 2 |
|---|---|---|---|---|
| coordinate | primer | primer | (FAM-MGB) | (VIC-MGB) |
| 104534 | ACGGAGATACTCTG | CATTGTCGGCCCGA | TGTGGAAgCCGACGCC | ATGTGGAAaCCGAC |
| | GCTCTGA | TTCG | [SEQ ID | GCC |
| | [SEQ ID | [SEQ ID | NO: 158] | [SEQ ID |
| | NO: 54] | NO: 106] | | NO: 210] |
| 104819 | CCGGCAGAGCAATC | GCGCTGGCAAAACA | CCCAAAACGAtGCCAG | CCAAAACGAcGCCA |
| | AGGATATG | GATTGG | C | GC |
| | [SEQ ID | [SEQ ID | [SEQ ID | [SEQ ID |
| | NO: 55] | NO: 107] | NO: 159] | NO: 211] |
| 141238 | GCGCACCATACTCG | GTTGCGCCATTCAA | CCAGAACCAgTTGTTC | CCAGAACCAaTTGT |
| | TTTACTCA | TGTCCAAT | A | TCA |
| | [SEQ ID | [SEQ ID | [SEQ ID | [SEQ ID |
| | NO: 56] | NO: 108] | NO: 160] | NO: 212] |
| 343457 | CAAAGTGGAAATTA | GCCGCAACACGGGT | CTTTTAACACATGCTG | CTTTTAACACATGC |
| | ACCCAGGATTCC | ATGA | gTGGAGCA | TGaTGGAGCA |
| | [SEQ ID | [SEQ ID | [SEQ ID | [SEQ ID |
| | NO: 57] | NO: 109] | NO: 161] | NO: 213] |
| 579050 | CGACGCACCATATT | CAAGATCCTGACGG | CGGTACATCgAACATC | CGGTACATCaAACA |
| | CAGGAAATT | GAAAGCT | [SEQ ID | TC |
| | [SEQ ID | [SEQ ID | NO: 162] | [SEQ ID |
| | NO: 58] | NO: 110] | | NO: 214] |
| 680692 | CCGAGGCATTGACG | CAGGATACGGCGTC | TCTGGCCaTCCTGG | TCTGGCCgTCCTGG |
| | GTCAT | AGTGTT | [SEQ ID | [SEQ ID |
| | [SEQ ID | [SEQ ID | NO: 163] | NO: 215] |
| | NO: 59] | NO: 111] | | |
| 869374 | CCAGGAGCTTAAGT | TGCGCCATGAAGCG | TTGTCGTTACaGATAT | TTGTCGTTACcGAT |
| | ATGACCGTTA | TAC | GG | ATGG |
| | [SEQ ID | [SEQ ID | [SEQ ID | [SEQ ID |
| | NO: 60] | NO: 112] | NO: 164] | NO: 216] |
| 869620 | CGCGCTGGTGTATG | TCCTTCAGCAGTTC | TGAATCGCGgATTGTG | ATGAATCGCGtATT |
| | AACATG | GCCAAT | [SEQ ID | GTG |
| | [SEQ ID | [SEQ ID | NO: 165] | [SEQ ID |
| | NO: 61] | NO: 113] | | NO: 217] |
| 872425 | CTCTTTTTCAATCC | CGGCAACCAGGCAA | AAGTCCGgGCCGCG | AAGTCCGcGCCGCG |
| | ACGAGACGGTAT | GTG | [SEQ ID | [SEQ ID |
| | [SEQ ID | [SEQ ID | NO: 166] | NO: 218] |
| | NO: 62] | NO: 114] | | |
| 874018 | TCCATTGCCTGTAG | GCCGTCTGTTTGGC | TGGCGCCgCTGATT | TGGCGCCaCTGATT |
| | CGAACC | GAAAA | [SEQ ID | [SEQ ID |
| | [SEQ ID | [SEQ ID | NO: 167] | NO: 219] |
| | NO: 63] | NO: 115] | | |
| 914443 | TGTGGATGTTGCTG | GAAAAGAAGAGCGG | TCGTGCCGAAgGTACA | CGTGCCGAAaGTAC |
| | CTTTATTACCT | AACAAAACCA | A | AA |
| | [SEQ ID | [SEQ ID | [SEQ ID | [SEQ ID |
| | NO: 64] | NO: 116] | NO: 168] | NO: 220] |
| 1085897 | CCGTTCACGCGGCA | CCGACAATTCGCCG | CGGTCGGcCCCGGT | CGGTCGGtCCCGGT |
| | A | ATCTG | [SEQ ID | [SEQ ID |
| | [SEQ ID | [SEQ ID | NO: 169] | NO: 221] |
| | NO: 65] | NO: 117] | | |
| 1090910 | GCTGTCAGTTGCTG | CTGGCGCTTTTACG | CGCGATTACaGAAGAT | CGCGATTACgGAAG |
| | GTATGCT | CAGAAA | [SEQ ID | AT |
| | [SEQ ID | [SEQ ID | NO: 170] | [SEQ ID |
| | NO: 66] | NO: 118] | | NO: 222] |
| 1317814 | CGCTGGACGCCATG | GGGAGTTGCAGCGG | TTTCTCGGGCcTCGCG | TTTCTCGGGCgTCG |
| | TAGTTTA | ATTATTTT | [SEQ ID | CG |
| | [SEQ ID | [SEQ ID | NO: 171] | [SEQ ID |
| | NO: 67] | NO: 119] | | NO: 223] |
| 1341676 | AGCGCGCGCAAGC | TGCGCGCTCCACCA | AGGATGCCGATATTAT | ATGCCGATATTATc |
| | [SEQ ID | T | tATCAGT | ATCAGT |
| | NO: 68] | [SEQ ID | [SEQ ID | [SEQ ID |
| | | NO: 120] | NO: 172] | NO: 224] |
| 1586827 | TCGCGGATGATCTC | GATGTGGTGCGTAA | CCGATCAGaATATCCG | CGATCAGgATATCC |
| | TTCAGTAAAG | CGTGAAG | [SEQ ID | G |
| | [SEQ ID | [SEQ ID | NO: 173] | [SEQ ID |
| | NO: 69] | NO: 121] | | NO: 225] |
| 1673378 | ACGTTCGGCAAGTT | ATTCTCAAGGTTAA | AAGCGATTTCaTCTTC | AAAGCGATTTCcTC |
| | TCTCCATTAA | TGCGCCTGA | T | TTCT |
| | [SEQ ID | [SEQ ID | [SEQ ID | [SEQ ID |
| | NO: 70] | NO: 122] | NO: 174] | NO: 226] |
| 2199971 | GACATCCGCACCGT | GGTCGGATATTCCT | CGAATGATGCgACATA | CGAATGATGCaACA |
| | TAAAGATTC | TGACCCATATT | T | TAT |
| | [SEQ ID | [SEQ ID | [SEQ ID | [SEQ ID |
| | NO: 71] | NO: 123] | NO: 175] | NO: 227] |
| 2207082 | CCTGGTCCAGCGAC | AGCAAGACGCTGAC | TTGCTCAACCAaCCGT | TTGCTCAACCAgCC |
| | ATATTCG | TTTGATCT | G | GTG |
| | [SEQ ID | [SEQ ID | [SEQ ID | [SEQ ID |
| | NO: 72] | NO: 124] | NO: 176] | NO: 228] |
| 2207589 | GTTACGTATTAATA | TGTCATTAGGTTAG | ATAGCGCgCTTAAAT | AGATAGCGCtCTTA |
| | GTTTTCTCGATGT | CTGCAACAATTC | [SEQ ID | AAT |
| | [SEQ ID | [SEQ ID | NO: 177] | [SEQ ID |
| | NO: 73] | NO: 125] | | NO: 229] |
| 2243744 | TTCTTCCAGCGCCT | CGCGATCTCAGCCA | CGGTACGgAAAGCGA | CGGTACGaAAAGCG |
| | GCA | GCTTA | [SEQ ID | A |
| | [SEQ ID | [SEQ ID | NO: 178] | [SEQ ID |
| | NO: 74] | NO: 126] | | NO: 230] |
| 2300257 | TGCCGCGCCGGTAT | CGTAAGCGGGCCGA | CAGCGCAACgGCGAA | CAGCGCAACaGCGA |
| | C | [SEQ ID | [SEQ ID | A |
| | [SEQ ID | NO: 127] | NO: 179] | [SEQ ID |
| | NO: 75] | | | NO: 231] |
| 2302792 | CCGTCATACCGGAG | GTGATTGCCGGTCT | CCTCAATGTTtGGCAA | CTCAATGTTcGGCA |
| | GTGTT | TTGCTTTT | CC | ACC |
| | [SEQ ID | [SEQ ID | [SEQ ID | [SEQ ID |
| | NO: 76] | NO: 128] | NO: 180] | NO: 232] |
| 2309364 | CCGCTGACGCAGAC | ACTGGGAACGCTTT | ATCGAACTGaCCCAGC | CGAACTGgCCCAGC |
| | CAT | GTTAACGA | C | C |
| | [SEQ ID | [SEQ ID | [SEQ ID | [SEQ ID |
| | NO: 77] | NO: 129] | NO: 181] | NO: 233] |
| 2326486 | ACGATGTTCAACGC | AAACGCGTACTGAG | ATTAATTTCGATATAa | AATTTCGATATAgA |
| | GAAGTAGTAG | CTATATGCT | ACAAACG | CAAACG |
| | [SEQ ID | [SEQ ID | [SEQ ID | [SEQ ID |
| | NO: 78] | NO: 130] | NO: 182] | NO: 234] |
| 2433579 | AGTGGATGTTGACA | ATCAATTAGCTGTT | AAGAGCAGAGgAACTG | AGAGCAGAGaAACT |
| | TACTCATTGCT | TTTATCATTTTCTA | [SEQ ID | G |
| | [SEQ ID | CAGT | NO: 183] | [SEQ ID |
| | NO: 79] | [SEQ ID | | NO: 235] |
| | | NO: 131] | | |
| 2433757 | ACTCCTTTCTATAA | CAACGGACACGATT | CACTTAATGTTAATGg | CACTTAATGTTAAT |
| | CCTTTTGTCAACTT | CAACAACATAA | TGATGAA | GaTGATGAA |
| | TAACA | [SEQ ID | [SEQ ID | [SEQ ID |
| | [SEQ ID | NO: 132] | NO: 184] | NO: 236] |
| | NO: 80] | | | |
| 2441456 | CCTAACCACCATAA | CGATTTATGCCGCC | TCAGTTAGGtCCGGCC | AGTTAGGcCCGGCC |
| | TCCCTGCAT | TGTCG | GT | GT |
| | [SEQ ID | [SEQ ID | [SEQ ID | [SEQ ID |
| | NO: 81] | NO: 133] | NO: 185] | NO: 237] |
| 3107015 | GGTGACACCAAACC | GCGGCGTTGACTGG | CCTTTGAACGTTTTAC | TTTGAACGTTTTAC |
| | AGCGA | C | tCCCAAT | cCCCAAT |
| | [SEQ ID | [SEQ ID | [SEQ ID | [SEQ ID |
| | NO: 82] | NO: 134] | NO: 186] | NO: 238] |
| 3144381 | TGATGAAAGGCGAA | GACATCACCTGGCC | AATCGCCGCTaCATAT | CGCCGCTgCATAT |
| | ATCGACGAT | CAGAT | [SEQ ID | [SEQ ID |
| | [SEQ ID | [SEQ ID | NO: 187] | NO: 239] |
| | NO: 83] | NO: 135] | | |
| 3151178 | GACTTCAATTCCCA | GCGTACCGCCGCCA | AGGTGCCaCATGACG | AGGTGCCgCATGAC |
| | TGCGTTGA | ATA | [SEQ ID | G |
| | [SEQ ID | [SEQ ID | NO: 188] | [SEQ ID |
| | NO: 84] | NO: 136] | | NO: 240] |
| 3151680 | CGCATCTCTCATGG | GGTAAAACCGGCGG | AACCGAACAgAGTGTT | ACCGAACAaAGTGT |
| | TATCAATTGAC | ACG | G | TG |
| | [SEQ ID | [SEQ ID | [SEQ ID | [SEQ ID |
| | NO: 85] | NO: 137] | NO: 189] | NO: 241] |
| 3355747 | CGCTACCTTGGTAC | GCGTGAAGCAACGG | CCGTCGGCgCTGTAA | CCGTCGGCaCTGTA |
| | GGCTTT | TAAGG | [SEQ ID | A |
| | [SEQ ID | [SEQ ID | NO: 190] | [SEQ ID |
| | NO: 86] | NO: 138] | | NO: 242] |
| 3425000 | TGTACTGCCCCAGC | TTCAAACGGCCCTC | CAGCGTTTGcGACACG | CAGCGTTTGtGACA |
| | ATCAG | GTGAA | [SEQ ID | CG |
| | [SEQ ID | [SEQ ID | NO: 191] | [SEQ ID |
| | NO: 87] | NO: 139] | | NO: 243] |
| 3498114 | GCAACATTGCAGGT | GCGCCGATGATCAG | CACAAACGcTTTTTTA | CACAAACGtTTTTT |
| | CTGGATAC | G | AACG | TAAACG |
| | [SEQ ID | [SEQ ID | [SEQ ID | [SEQ ID |
| | NO: 88] | NO: 140] | NO: 192] | NO: 244] |
| 3501524 | CTCCAGGCGGTGAT | ACGTTACCACTCGC | CCACGTTGCCtGAGTG | ACGTTGCCaGAGTG |
| | CTCAAA | TGATTGTC | T | T |
| | [SEQ ID | [SEQ ID | [SEQ ID | [SEQ ID |
| | NO: 89] | NO: 141] | NO: 193] | NO: 245] |
| 3776636 | CCGCCATCCCCATA | CGCACGGCGCTAAT | ATCGGCaCCAAGCG | CGGCgCCAAGCG |
| | AAGGT | CAC | [SEQ ID | [SEQ ID |
| | [SEQ ID | [SEQ ID | NO: 194] | NO: 246] |
| | NO: 90] | NO: 142] | | |
| 3778064 | GCCGTCAATCGCAA | GCGAAGTCATGGCC | AAGCAACCTGtCCGTT | CAACCTGcCCGTTT |
| | TTTCCT | AATATTGAAAT | TT | T |
| | [SEQ ID | [SEQ ID | [SEQ ID | [SEQ ID |
| | NO: 91] | NO: 143] | NO: 195] | NO: 247] |
| 3866852 | ACGAAACGCCGTAA | CTGGCGCGAAAGCA | TGCTCGcTAAAAAG | CTGCTCGtTAAAAA |
| | CCGTAAA | AAGT | [SEQ ID | G |
| | [SEQ ID | [SEQ ID | NO: 196] | [SEQ ID |
| | NO: 92] | NO: 144] | | NO: 248] |
| 3867081 | CCGCGCCGACAATC | TGCCGGAACGCTCG | CCATCACGATcACCGC | CCATCACGATgACC |
| | G | ATAC | [SEQ ID | GC |
| | [SEQ ID | [SEQ ID | NO: 197] | [SEQ ID |
| | NO: 93] | NO: 145] | | NO: 249] |
| 4002077 | CCCGGCGATGCGGT | TGAGTTTATCCACC | CACCAGAATgCGTTTC | CACCAGAATcCGTT |
| | T | ACCACCAC | A | TCA |
| | [SEQ ID | [SEQ ID | [SEQ ID | [SEQ ID |
| | NO: 94] | NO: 146] | NO: 198] | NO: 250] |
| 4129096 | GTTAACGATCTGGT | GGAATCATCGCCTG | CGGGCAGTAAATgATA | CGGGCAGTAAATaA |
| | GCTGCAAA | CCAGTTTA | T | TAT |
| | [SEQ ID | [SEQ ID | [SEQ ID | [SEQ ID |
| | NO: 95] | NO: 147] | NO: 199] | NO: 251] |
| 4129999 | GCCAAGCGCGGACA | GCCGAGTTACGTGG | AAAAGTgCAAAATCT | CAAAAGTaCAAAAT |
| | [SEQ ID | TGATTATGG | [SEQ ID | CT |
| | NO: 96] | [SEQ ID | NO: 200] | [SEQ ID |
| | | NO: 148] | | NO: 252] |
| 4191971 | CCGACGATACCCAT | GGTTCGGCCACCAG | CAGGGACaGCCAGCC | CAGGGACtGCCAGC |
| | AACACGTTA | TCG | [SEQ ID | C |
| | [SEQ ID | [SEQ ID | NO: 201] | [SEQ ID |
| | NO: 97] | NO: 149] | | NO: 253] |
| 4206466 | CCAGTCCGGGTTCT | GAAACCACGCCGGA | CTGTTGCAGaATCTCA | TGTTGCAGgATCTC |
| | TTTCGT | ACTG | A | AA |
| | [SEQ ID | [SEQ ID | [SEQ ID | [SEQ ID |
| | NO: 98] | NO: 150] | NO: 202] | NO: 254] |
| 4206625 | GCGCGGATAACCG | CGCCGCTGGCTAAC | CCAGTACCAGcGTGCG | CCAGTACCAGtGTG |
| | TACA | TTC | [SEQ ID | CG |
| | [SEQ ID | [SEQ ID | NO: 203] | [SEQ ID |
| | NO: 99] | NO: 151] | | NO: 255] |
| 4207216 | GTGAGCTGTACAGT | GCACTGCTCTACTT | CCGTTTGTCCCaCTGT | CGTTTGTCCCgCTG |
| | AGCGAATCC | TTGGTTCTTTT | AT | TAT |
| | [SEQ ID | [SEQ ID | [SEQ ID | [SEQ ID |
| | NO: 100] | NO: 152] | NO: 204] | NO: 256] |
| 4207666 | TCTTCAGTCAGACG | TCAGTTAAGAAACG | CAGGCCGAgTTGCT | AGGCCGAaTTGCT |
| | GGAACGATA | TTTATACCGATCCA | [SEQ ID | [SEQ ID |
| | [SEQ ID | TT | NO: 205] | NO: 257] |
| | NO: 101] | [SEQ ID | | |
| | | NO: 153] | | |
| 4240670 | GTCCCGTGACACCA | GTAAACGATACCGG | ACGTTCGGGATgTCAG | CGTTCGGGATaTCA |
| | AGCT | ATTCATCCAGTT | [SEQ ID | G |
| | [SEQ ID | [SEQ ID | NO: 206] | [SEQ ID |
| | NO: 102] | NO: 154] | | NO: 258] |
| 4244367 | GCGATGATGGATAA | AATCTGTGCCGCAG | CTGTTGAAGGAgACCT | TGTTGAAGGAaACC |
| | CCTGCAAAC | AACCA | G | TG |
| | [SEQ ID | [SEQ ID | [SEQ ID | [SEQ ID |
| | NO: 103] | NO: 155] | NO: 207] | NO: 259] |
| 4245891 | TGTAGAACGTGGTG | CCCTGCAGACGGTA | CAGCATGAACgCCACG | CAGCATGAACaCCA |
| | ATGTGATTTCC | TACATCCT | C | CGC |
| | [SEQ ID | [SEQ ID | [SEQ ID | [SEQ ID |
| | NO: 104] | NO: 156] | NO: 208] | NO: 260] |
| 4372200 | GGGCTGGCTTTTTC | TGAGCATGTGATCG | TGGCAAGAAGgCCGCG | TGGCAAGAAGaCCG |
| | AATCAAATCG | TCCTGAAG | AC | CGAC |
| | [SEQ ID | [SEQ ID | [SEQ ID | [SEQ ID |
| | NO: 105] | NO: 157] | NO: 209] | NO: 261] |

[0125] Each embodiment disclosed herein may be used or otherwise combined with any of the other embodiments disclosed. Any element of any embodiment may be used in any embodiment. Although the invention has been described with reference to specific embodiments, it will be understood by those skilled in the art that various changes may be made and equivalents may be substituted for elements thereof without departing from the true spirit and scope of the invention. In addition, modification may be made without departing from the essential teachings of the invention.

The application's sequence listing, which the Patent Office published only in electronic form, follows.

SEQUENCE LISTING (261 sequences)

SEQ ID NO: 1 - DNA, 201 bp, Salmonella enteritidis
tgatcggcgacggcttaagcagaatatgacgagcgtgaacttcggtcacggagatactctggctctgaccgcgcaggtcgtttactttcagaatgtggaaaccgacgccggagcgaatcgggccgacaatgtcgcctttcttcgcggtgctcagcgcctgggcgaaaatccccggcagctcctggatacggccccagccca

SEQ ID NO: 2 - DNA, 201 bp, Salmonella enteritidis
caatgctttccgcctggcgctgtgcgtcgttaacctgctcggaggttgggttttccggcagagcaatcaggatatggctcaggttcagctcggtgctggcgtcgttttgggtgccaatctgttttgccagcgcgtcaacttcttgcggcaaaacggtgatacggcgacgaacctcgttgttgcgcacttcagagataatca

SEQ ID NO: 3 - DNA, 201 bp, Salmonella enteritidis
gaagctgccactctgcttgttcatttgcatcattttaacggcggtgacggtggtcacgacggcgcaccatactcgtttactcaccgcgcagcgtgaacaattggttctggagcgcgatgcattggacattgaatggcgcaacctgatccttgaagaaaatgcgctaggcgatcacagccgggtggagcggatcgcaacgga

SEQ ID NO: 4 - DNA, 201 bp, Salmonella enteritidis
gctatttcgcgccgcgcggtatcgcgatgttaacgcttgatatgccttcggttggattttcatcaaagtggaaattaacccaggattccagcttgctccaccagcatgtgttaaaagcgcttcctaatgttccctgggtggatcatacccgtgttgcggcgtttggtttccgttttggcgccaatgttgcggtgcgtctgg

SEQ ID NO: 5 - DNA, 201 bp, Salmonella enteritidis
agccgcgtgcgacgcaccatattcaggaaattatcgagctcacccgcaccttaatcgagaaaggacacgcctatgtggcggataacggcgatgtgatgttcgatgtaccgaccgatccgacttatgggcagctttcccgtcaggatcttgagcagcttcaggcgggcgcgcgcgtagatgtcgttgacgtgaagcgtaacc

SEQ ID NO: 6 - DNA, 201 bp, Salmonella enteritidis
acgaacggtacactttcgtgctgataggatagatgtcatggcccggaatcaataccgaggcattgacggtcatcaccatctgatattccgccgtctggccgtcctggaacactgacgccgtatcctgcgaaatagtcaccgttccaagccgcagagacggaacgtctttgcgcgttgtgtctttatcaagcaagtttacgt

SEQ ID NO: 7 - DNA, 201 bp, Salmonella enteritidis
attcgaaataaatttgtggttctgctcacattgttattaaaatgtttctggtcgcagttacagccaggagcttaagtatgaccgttaacgttgtcgttaccgatatggacggcacttttctcgacgatgccaagcagtacgatcgtgtacgcttcatggcgcaataccaggaactgaaaaaacgtaatatcgaatttgtag

SEQ ID NO: 8 - DNA, 201 bp, Salmonella enteritidis
agctgaaagacgaaatttcctttgtcgcagaaaatggcgcgctggtgtatgaacatggcaagcagttgtttcacggggagctaacccaacatgaatcgcgtattgtgattggcgaactgctgaaggataagcaacttaattttgtcgcctgcggtctgaaaagcgcttatgtcagcaaaaacgctcccgagactttcgtgg

SEQ ID NO: 9 - DNA, 201 bp, Salmonella enteritidis
tttcttcacttacggaaaaacctgcgccgggccggtctgccaggtcgtcgatctctttttcaatccacgagacggtatattccgggaaaatcggcgcggcgcggacttcacttgcctggttgccgacgatcagttcatcgtgttttatccagatagtgcgttccgccaggtgatgggccagcgccagcgcgcggcgtaccg

SEQ ID NO: 10 - DNA, 201 bp, Salmonella enteritidis
tcgcatcgtacatgacgatttttccgctagcgggctgaccgtaatgcgccagcagcttaatggcctccattgcctgtagcgaaccgatcacgccaatcagtggcgccatcacccctgcctctacgcaggtcagagcgttttcgccaaacagacggctcaggcagcggtaacagggttcgttttcccgatacgtaaagacgg

SEQ ID NO: 11 - DNA, 201 bp, Salmonella enteritidis
ggcaggatcgctttattcctaacgctataccggctgtggatgttgctgctttattacctttttcgccgaacgcggccacgctgggattcgtcttttgtactttcggcacgattttttccatgggcatcctgctgctcatccatagccctattatggtattgcctggttttgttccgctcttcttttccggcggtcccatcg

SEQ ID NO: 12 - DNA, 201 bp, Salmonella enteritidis
gaacggcggcaagctgcgtcaacgcgtcctgttcgtcatcagccaggcataatacccgttcacgcggcaacagcgtccaggtattgcgctcgccggtcggtcccggtagcaggcgctgcgtgccggcctgcgccagatcggcgaattgtcggcagagcgtctgtagcgccgggcgatccgccgcccattgcgtcagagcgg

SEQ ID NO: 13 - DNA, 201 bp, Salmonella enteritidis
tgtttaacccgtggattgccggtgttctgctgtctgctatcctggcggcggtgatgtcgacgttgagctgtcagttgctggtatgctccagcgcgattacagaagatttatataaggcttttctgcgtaaaagcgccagccagcaagagctggtatgggtagggcgagtgatggtgctggtggtagcgctgatcgccattg

SEQ ID NO: 14 - DNA, 201 bp, Salmonella enteritidis
ccgcaggcgccgcgctatatctggaagcttcagcaggcgctggacgccatgtagtttagcgtgaagattattctcgcactttattcgctctttctcgggcctcgcgctcaagcgaaaaaataatccgctgcaactcccgctctaccgccgggctgacgttaaggaaacgaaagctcaggcggggagtggtgatcgtttcat

SEQ ID NO: 15 - DNA, 201 bp, Salmonella enteritidis
accgaacccgcgagcgcgcgcaagccctggcggatgaggtaggcgctgaggttatctcgctcagcgatatcgacgcccgcttgcaggatgccgatattatcatcagttcgaccgccagcccgctgccgattatcggtaaaggcatggtggagcgcgcattaaaaagccgtcgcaaccagccgatgctgctggtggatatcg

SEQ ID NO: 16 - DNA, 201 bp, Salmonella enteritidis
gattagagagcggcatgacgatcgggcgagggcaatgcttatgcatctcgcggatgatctcttcagtaaagagcccggtctggccggaaaccccgatcaggatatccggcttcacgttacgcaccacatccagcagcgacagcacgtcattttcggtatcccagtgctggagattgtcgcatttctgcaccagttttgcct

SEQ ID NO: 17 - DNA, 201 bp, Salmonella enteritidis
ccgtaaccttacgttcggcaagtttctccattaacccaggattttgcgcaggccagataaaactgaccagcgtagtcccggggttcagtaaagcgatttcctcttcttcaggcgcattaaccttgagaataatttccgactgccagatagcattgccgtctacaatatccgcgccagcctgcgcaaacgctttgtcgtcaa

SEQ ID NO: 18 - DNA, 201 bp, Salmonella enteritidis
tcattagcactgcgaaccaggaaaaataaataatcagcagatacaatccattgtctatggttttcccgacatccgcaccgttaaagattccgaatgatgcgacatattcataaagtgagccaaatctgactacaccatcaatatgggtcaaggaatatccgaccatgactaaggggcccacaatacgataataagaagatg

SEQ ID NO: 19 - DNA, 201 bp, Salmonella enteritidis
acatcgccaggcccgacgcgatactgatagctggcgatctcctggtccagcgacatattcggttgcgcgacattgggccgcgggcgtaattgctcaaccagccgtggcgtcagcggatacacattgaccatccggtcgagatcaaagtcagcgtcttgctgtttgatcacatctttccccatcgtagacatattgctgccc

SEQ ID NO: 20 - DNA, 201 bp, Salmonella enteritidis
cgcattcccctcagattttatcctcgttcagataaaaatcttcagcgaaataaaggttacgtattaatagttttctcgatgtcgtgacaggatatttaagagcgctatcttaatcctgcaagaattgttgcagctaacctaatgacaggcaaggtaacaaacccgccattctatatttttaagattaatattaaatgaatt

SEQ ID NO: 21 - DNA, 201 bp, Salmonella enteritidis
gcgcctctttcagggaatattcaaagatattattgatttgcgtaccgtagccgcgggcgcgcgtgacgaccccctcttcttccagcgcctgcatcgcttttcgtaccgtgatgcgcgagacgccggtaagctggctgagatcgcgttcgccaggcaaaatattaccgtgctcaagaataccgctgcgcacggcatccttta

SEQ ID NO: 22 - DNA, 201 bp, Salmonella enteritidis
tatcgcccacgttcagaacgcccgcacgcagtttaacgtttttcgtcgcctgccatgccgcgccggtatcccagaccacgtacccgcccggcgttttcgctgttgcgctgtcggcccgcttacgcccggtatacttccctgatacgtagaatgaccagtcttcgagctgcgccggtttccagtccagcgtaccgttcgcgg

SEQ ID NO: 23 - DNA, 201 bp, Salmonella enteritidis
cgcgacggaagcgataatggctaatggcaatccccagccaggcgatgaagcccgtcataccggaggtgttcaacagccacagatagaccgtctggttgccaaacattgaggtcaaaaagcaaagaccggcaatcacggtggtggcataaagcgcattgcgcggtacgccgccgcgggacaatttcgcaaaaatacgcgggg

SEQ ID NO: 24 - DNA, 201 bp, Salmonella enteritidis
tgcatggacactggctgcgcagacgcgtcatccagtcggtgaacgcttccggactcacgccagccggtaagctaccgctgacgcagaccatatcgaactggcccagccagctcagggagtcgttaacaaagcgttcccagtctgcgggggtcacgtcaaagccggaaaagttgaagtcggtcacttcgccatctttttccg

SEQ ID NO: 25 - DNA, 201 bp, Salmonella enteritidis
caaaacggctgttgataatcgtcatcacaaacagaaatacgatgttcaacgcgaagtagtagccgaaatcctgcggcggaacatgattaatttcgatataaacaaacggccccgcgctcaaaaaagagaacataccggcaaaactaaacccgctcgccagcatatagctcagtacgcgtttgtggcgaaacaacgcggcaa

SEQ ID NO: 26 - DNA, 201 bp, Salmonella enteritidis
aatggcaacgataagaaagatagcgaatgcccagtgatgagcgatgacttcagtggatgttgacatactcattgcttactcatcaaaagtagcgccagttcctctgctctttacggcagatggacgccacatcgattcatggggaggaataaaaaaaaccctacaattactgtagaaaatgataaaaacagctaattgatg

SEQ ID NO: 27 - DNA, 201 bp, Salmonella enteritidis
atgataaaaacagctaattgatgtggttttttactcctttctataaccttttgtcaactttaacaaaagttccttcacattaatttacatcaattcatcatcattaacattaagtgccatcctggagaaaatgactcttcgaccaggggggattttatgttgttgaatcgtgtccgttgtgaagcaaaagaaataacacac

SEQ ID NO: 28 - DNA, 201 bp, Salmonella enteritidis
taaggattgaaggcggcaacggcgtcacggaacgtttccctaaccaccataatccctgcataggcaagctcagggcgaacagggcggtcgccacggccggacctaactgaccgcccagcgctatctgccagcataatgtaaagacggcgacaggcggcataaatcgtatggcatagcgcgtcatacgaatgacgcggtttt

SEQ ID NO: 29 - DNA, 201 bp, Salmonella enteritidis
cggaccagctcagcacctcatcgcgctggtcgagtgggtgacaccaaaccagcgaacatcggccatgcgacatcggcaacatcgccagcgggccattgggagtaaaacgttcaaaggcgcgtccctgatgcgggatagcggtcgcgacattcgctatcaccgctaactgttcgtaaggctcctgatgccagtcaacgccgc

SEQ ID NO: 30 - DNA, 201 bp, Salmonella enteritidis
gcagtaatcaggtattcgatgctgaaatcattagcgccagtaagaaaagcgttgaagtgcaagtgatgaaaggcgaaatcgacgatcgtgaatcgccgctacatatccatctgggccaggtgatgtcgcgcggtgaaaaaatggaatttactatccagaaatcgatcgaactaggtgtaagcctcattacgccactgttct

SEQ ID NO: 31 - DNA, 201 bp, Salmonella enteritidis
ctaaactaccgccgctcagtctttatattcatattccctggtgtgtacaaaaatgtccatattgcgacttcaattcccatgcgttgaagggcgaggtgccacatgacgactacgtccagcatctgttaaacgatctggatgccgacgtcgcttgggcgcaagggcgtgaagtaaagaccatttttattggcggcggtacgc

SEQ ID NO: 32 - DNA, 201 bp, Salmonella enteritidis
ggaccaaacgctggaagaggcgctgaatgatttgcgacaggcaattgcgcttaatccgccgcatctctcatggtatcaattgacgattgaacccaacactctgttcggttcgcgtccgccggttttaccggacgatgacgctctgtgggatatctttgagcagggccaccagttattaaccgccgcgggctatcagcaata

SEQ ID NO: 33 - DNA, 201 bp, Salmonella enteritidis
ttcttgccggttgtacgcctgagcaagagaaagggttgcaggactatggccgctaccttggtacggctttccagctcattgacgatctgctggattacagtgccgacggcgagcatctcggtaaaaatgtgggtgatgacctcaatgagggcaaacctaccttaccgttgcttcacgccatgcgccacggtacgccagaac

SEQ ID NO: 34 - DNA, 201 bp, Salmonella enteritidis
tgtactgccccagcatcagcaggtcgctgttttttagcagtaattcctggcgcagcgcccgattttccagctcaagctggtcgcgagaagccagcgtttgcgacacgctgtcgagcagttcacgagggccgtttgaaataaaatagaaaggactgacggcagtgtccatgtacgttcggatttgactgaacgtccccaggc

SEQ ID NO: 35 - DNA, 201 bp, Salmonella enteritidis
tggctgtcggtttattgataggccagctacacctgggcttgcttttctctctcgttcccgcctgctgcaacattgcaggtctggataccccgcacaaacgtttttttaaacgcctgatcatcggcgcgtcgctgttcgccggatgcagtctggtaacgcaacttctgctggcggaatccatccccctgccgttgatcctga

SEQ ID NO: 36 - DNA, 201 bp, Salmonella enteritidis
tactttccgggtggaactgcacgccttccagatcccactcgcggtggcgaatgcccataatctcctgcgtttcgctccaggcggtgatctcaaaacactcaggcaacgtggcagggtcgacaatcagcgagtggtaacgtgtcacggttaacgggctgggcaatccccgaaacacgccctgtccattatgcgtaacaggtg

SEQ ID NO: 37 - DNA, 201 bp, Salmonella enteritidis
caagcatcatgccaaaacgacggttgcgcgactggttgtcggtacaggtcagcaccagatcgcctaaacccgccatccccataaaggtggcgggatcggcaccaagcgctgcgccaagccgcgacatttcggtcagtccacgcgtgattagcgccgtgcgggcgttcgcgccgaagccgatgccgtcagacatccccgcgc

SEQ ID NO: 38 - DNA, 201 bp, Salmonella enteritidis
tgatcatctcttcacgcttcacggcgtcgccgtcaatcgcaatttcctggaaactcacgcccttgctgtttaacagcgcctttgcacgatggcaaaacgggcaggttgctttggtgtagatttcaatattggccatgacttcgctcctgtttttttacccgatggatttcatgtcgacgcaaaggcaagtcattccccttg

SEQ ID NO: 39 - DNA, 201 bp, Salmonella enteritidis
accgcggctgttttgtattttcaatccttccacgccgctggcgtaacgaaacgccgtaaccgtaaaatcgtcattttccagcaagatacgcggctgctcgctaaaaagctcccgccataatgtaatacgtattgtcatggttgatctcctcaggacgcggcgacttcagccaggttgccgcgcactttgctttcgcgccag

SEQ ID NO: 40 - DNA, 201 bp, Salmonella enteritidis
gcatggaaaccaggaatgagagctgtagcgagtggaacatgtccgccacgtagccctgaatcgcgggaaccaccgccgcgccgacaatcgccatcacgatgaccgcccccgccatttcggtatgctcgttatcgacggtatcgagcgttccggcataaatggtcgcccagcaggggccaaacagaacactgaccagcaccg

SEQ ID NO: 41 - DNA, 201 bp, Salmonella enteritidis
gtgatgctggtcgatcacgacgaatttaaagcgattcccggcgatgcggttcatcaacgttatgtggttgataccaaaggagtctggcgctgatgaaacgcattctggtgaccggaggcgcaggctttatcggatctgcggtggtgcggcatatcatccatgaaacggcagacgcggtggtggtggtggataaactcacct

SEQ ID NO: 42 - DNA, 201 bp, Salmonella enteritidis
atgagcgcccatacagaattacccgcggcgatctgttttacattcgtgctgaagacaaacactcctatacctccgttaacgatctggtgctgcaaaatatcatttactgcccggagcgtttgaaactcaatgtaaactggcaggcgatgattcccggctttcagggagcgcagtggcatcctcactggcggctgggcagta

SEQ ID NO: 43 - DNA, 201 bp, Salmonella enteritidis
actgcaaataccacatcagaccgccaagcgcggacagcagaatattgctgataatcaacggtcttgccagcgagaagtcggcttttatcgacagattttgtacttttgccaggcggataaaacagaaaccgaggttaaccagcgcgccgccgcccataatcaccacgtaactcggcagcgcgacatagagcgggtcaacgc

SEQ ID NO: 44 - DNA, 201 bp, Salmonella enteritidis
gctgagatatgagcacgaccgacgatacccataacacgttatccactggaaaatgtcctttccatcagggggggcatgaccgaagcgcaggcgcagggactgccagccgcgactggtggccgaaccagcttcgcgtggatcttttgaatcaacattccaaccgttctaacccgctgggtgaagactttgactaccgcaaag

SEQ ID NO: 45 - DNA, 201 bp, Salmonella enteritidis
aggttttatacccggcctgtttcatcatattcatcagcgatggcttcgtcagataccagtccgggttcttttcgtccgcgaacgttagcgcctgttgcaggatctcaatggtgtacggtcgcgaagttaccacattattaaacacggtcagcccggggtcggttttatgcagcgcgtccagttccggcgtggtttcgcgcg

SEQ ID NO: 46 - DNA, 201 bp, Salmonella enteritidis
cggttttatgcagcgcgtccagttccggcgtggtttcgcgcggataaccgtacagactcatacggccacgctgggtcgattcgccaatcaccagtaccagtgtgcgcggcgcatcgccggagtggtcctggaagttagccagcggcggcagggcatcgttttcattcagcagtttattcagcgaggcgagctgtaaacggt

SEQ ID NO: 47 - DNA, 201 bp, Salmonella enteritidis
caataacggccgcaataacccggatgcggcctggaaacagaaagaccgggatcagccacagtgagctgtacagtagcgaatcccgcagaccgtttgtcccgctgtatccggtgagataaataatggcctgcaggagggtggaaaagaaccaaaagtagagcagtgcccagcccagggctttccagctaaacgcgggtttag

SEQ ID NO: 48 - DNA, 201 bp, Salmonella enteritidis
taccggcggcgacgcccgcaatcgtgaccatcaacgcctgttcgacgcgaggatcgggcgatttgccctgctcttcagtcagacgggaacgatacagcaactcggcctgcaacacgtttaatggatcggtataaacgtttcttaactgaatggactccgcaatccacggtaagtcggccatcaggtgcgaatcgttggcaa

SEQ ID NO: 49 - DNA, 201 bp, Salmonella enteritidis
agcgtgttgtccaggaagaccgtttcaccaccatccacattcaggaactggcgtgcgtgtcccgtgacaccaagctggggccggaagagatcaccgctgacatcccgaacgtgggtgaagctgcgctctccaaactggatgaatccggtatcgtttacattggcgcggaagtgaccggcggcgacattctggtcggtaagg

SEQ ID NO: 50 - DNA, 201 bp, Salmonella enteritidis
atatctgggctgcggcgaacgatcgtgtatctaaagcgatgatggataacctgcaaactgaaaccgtgattaaccgtgacggccaggaagagcagcaggtctccttcaacagcatctacatgatggccgactccggtgcgcgtggttctgcggcacagattcgtcagcttgctggtatgcgtggtctgatggcgaagccgg

SEQ ID NO: 51 - DNA, 201 bp, Salmonella enteritidis
aatggcgtcagctcaacgtgttcgaaggggaacgtgtagaacgtggtgatgtgatttccgacggtccggaagcgccgcacgatattctgcgtctgcgtggtgttcatgctgtgacgcgttacatcgttaacgaagtccaggatgtataccgtctgcagggcgttaagattaacgataaacacatcgaagttatcgttcgtc

SEQ ID NO: 52 - DNA, 201 bp, Salmonella enteritidis
ggaggtataaaggataaacagcggatcttcggcattcatcgcttcaggctggtgctcagggctggctttttcaatcaaatcgcgccaccacaggtcgcggccttcttgccagtcaatgtcgctgtcggtgctcttcaggacgatcacatgctcaacgctagtgacattcgggtttttcagcgcgtcatcgacattcttttt

SEQ ID NO: 53 - DNA, 4685848 bp, Salmonella enteritidis (residues 1-1,561,950 of 4,685,848)
aggtaacggtgcgggctgacgcgtacaggaaacacagaaaaaagcccgcacctgaacagtgcgggcttttttttcgaccagagatcacgaggtaacaaccatgcgagtgttgaagttcggcggtacatcagtggcaaatgcagaacgttttctgcgtgttgccgatattctggaaagcaatgccaggcaagggcaggtagcgaccgtactttccgcccccgcgaaaattaccaaccatctggtggcgatgattgaaaaaactatcggcggccaggatgctttgccgaatatcagcgatgccgaacgtattttttctgacctgctcgcaggacttgccagcgcgcagccgggattcccgcttgcacggttgaaaatggttgtcgaacaagaattcgctcagatcaaacatgttttgcatggtatcagcctgctgggtcagtgcccggatagcatcaacgccgcgctgatttgccgtggcgaaaaaatgtcgatcgcgattatggcgggacttctggaggcgcgtgggcatcgcgtcacggtgatcgatccggtagaaaaactgttggcggtgggccattaccttgaatctaccgtcgatatcgcggaatcgactcgccgtatcgccgccagccagatcccggccgatcacatgatcctgatggcgggctttaccgccggtaatgaaaagggtgaactggtggtgctgggccgtaatggttccgactattccgccgccgtgctggccgcctgtttacgcgctgactgctgtgaaatctggactgacgtcgatggcgtgtatacctgtgacccgcgccaggtgccggacgccaggctgctgaaatcgatgtcctaccaggaagcgatggaactctcttacttcggcgccaaagttcttcaccctcgcaccattacgcccatcgcccagttccagatcccctgtctgattaaaaataccggtaatccgcaggcgccaggaacgctgatcggcgcgtccagcgacgatgataacctgccggttaaagggatctctaaccttaacaacatggcgatgtttagcgtctccggcccgggaatgaaagggatgattgggatggcggcgcgtgttttcgccgccatgtctcgcgccgggatctcggtggtgctcattacccagtcctcctctgagtacagcatcagcttctgtgtgccgcagagtgactgcgcgcgtgcccgccgtgcgatgcaggatgagttctatctggagctgaaagaggggctgctggagccgctggcggttacggagcggttggcgattatctctgttgtcggcgacggtatgcgcacgctacgcggcatttcagcgaaattcttcgccgcgctggcgcgggctaatatcaatatcgtggcgatcgctcagggatcttctgagcgttccatttctgtggtggtgaataacgacgatgccaccaccggcgtgcgggtaacgcaccagatgctgttcaataccgatcaggtgattgaagtatttgtcattggcgtcggcggcgtcggcggcgcgctactggaacagcttaaacgtcagcaaacctggttgaagaacaagcacatcgatctacgcgtgtgcggcgtggcgaactcaaaggcgttgctaaccaatgtgcatggcctgaatctggacaactggcaggcggaactggcgcaagcgaacgcgccgttcaatctgggacgcttaattcgcctggtgaaagaatatcatctactcaatccggtgattgttgattgtacctccagtcaggcggtggccgaccagtatgccgacttcctgcgtgaaggattccatgtggtgacgccaaacaagaaagcgaacacctcgtcgatggactactaccatcagctacgtttcgccgccgcgcaatcacggcgcaaattcttgtatgacaccaacgtcggcgccggtttgccggtaatcgaaaacctgcaaaacctgctgaatgcgggtgatgaactgcaaaaattttccggcattctttccgggtcgctctcttttattttcggtaaactggaagaggggatgagtctctcacaggcgaccgccctggcgcgcgagatgggctataccgaacccgatccgcgcgacgatctttccggtatggatgtggcgcggaaactgttgatcctcgcccgcgagacgggccgcgagctggagctttccgatattgtgattgaaccggtgttgccggacgagtttgacgcctccggcgatgtgaccgcctttatggcgcatctgccgcagcttgacgacgcgtttgccgcccgtgtggcgaaagctcgtgatgaaggtaaggtattgcgctatgtgggcaatatcgaagaggatggcgtgtgccgcgtgaagattgccgaagttgatggtaacgatccgctcttcaaagtgaaaaacggtgaaaacgcgctggcgttctacagccactattatcagcccttgccgttggtgctgcgcggctacggcgcaggcaatgatgtgacggcggcgggcgtgtttgccgatctgttacggaccctctcatggaagttaggagtttaacatggtgaaagtgtatgccccggcttccagcgcgaacatgagcgtcggtttcgacgtgttgggcgcagccgtcacacccgttgacggcacgttgctgggcgatgtggtatccgttgaagcagcggaccatttccgtctgcataacctggggcgatttgccgataaactgccgccggagccgcgtgaaaatattgtttatcagtgctgggaacgtttttgccaggcattggggaaaaccatcccggtggcgatgacgctggaaaaaaatatgccgattggttccgggttagggtccagcgcctgttccgtcgtcgccgcgctggtcgcgatgaatgagcactgcggcaaaccgttaaacgacacgcgtctgttggcgctgatgggcgagctggaaggccgtatctccggcagcatccattacgataacgtcgcgccgtgctttcttggcggtatgcagttgatgattgaagaaaacggcattattagtcagcaggtgccgggctttgatgagtggctatgggtactggcttatccgggcattaaagtttctaccgcagaagcacgggccattttgcctgcgcagtatcgccgtcaggattgcattgcgcatggacggcatctggccggttttattcacgcctgttactcgcggcagccgcagcttgccgccgcgctgatgaaagatgttattgccgaaccataccgcgcgcgtttactgccgggctttagccaggcgcgacaggcggtgtcggagatcggcgcgctggcgagcgggatttccggatcggggccgacgctgtttgcgctatgcgataaaccggagacggcgcagcgcgtcgcggactggctgagcaaacattatctgcaaaatcaggaaggcttcgttcatatttgccggctggatacggcgggcgcacgagtagtgggataatcaatgaaactctataatctgaaagaccataatgagcaggtcagctttgcgcaggccgtcacgcaagggctgggcaaacagcagggacttttttttccgcacgaactgccggagtttagcctgacggaaattgatgagatgctcaaccaggactttgtcagccgtagcgcaaagatcctctcggcatttattggcgatgaaataccgcagcaaattctggaagagcgcgtccgcgcggcgtttgctttcccggcgccggtagcgcaggtagaaagcgatgtcggctgcctggagctgttccatggtccgacgctggcctttaaagacttcggcgggcgttttatggcgcaaatgctgacgcatatcagcggcgacaaaccggtgacgattctgaccgcaacgtcaggcgataccggcgcggcggtggctcacgcgttctatggcctggaaaatgtgcgggtcgtcattctctatccgcgcggtaaaatcagtccgttgcaggaaaaactgttctgtactctgggcggcaacattgaaaccgtagcgatcgacggcgatttcgacgcttgccaggcgctggtgaaacaggcatttgatgacgaagaactgaaaacggcgctggggctgaattcagctaattcgattaatatcagccgcctgctggcgcaaatttgctactactttgaagccgtggcgcaactgccgcagggggcgcgtaaccaactggtgatctccgtacccagcggcaactttggcgatttgacggcaggactgctggcgaagtcgttaggcctaccggtgaaacgctttatcgccgccaccaacattaacgatacggtgccgcgtttcctgcaggacgggaagtgggcgccaaaagcgacgcaggcgaccctgtcgaatgcgatggatgtcagccagccgaataactggccgcgtgtggaggagctattccgccgtaaaatctggcgtctgactgagctgggctatgcggcggtggatgacactacgacacaacagacgatgcgcgagctgaaagcgaaaggttatatctcggaacctcatgcggcggtagcgtatcgggcattacgcgaccagttaaaccctggcgagtatggcttgtttctcggaacggcgcatccggcgaagtttaaagaaagcgtggagtccattctgggagaaacgctggccttgcctgaagcgctcgccgaacgcgccgacctgccgctgctttcacatcatctgcctgcggattttgccgccctgcgtaagctgatgatgacccgccagtaaccattgcgcccggtggcgctgtcgcttaccgggcctatggggtggtgtcgatttgtaggccggataaggcgtaaccgccatccggcgatgccgttactgctcgtagcgtttaaagaccagctcgtcttgtgtggaggtttcttcatcaaagaaatacccttcacggtcaaacgcggtaagctgttccggcttcgttaagcggttttcaataataaaacggctcatcagtccgcgcgcttttttggcgtagaagcttaccaccttaaacttgccgtttttctcatcaaggaacacgggcttaatcagttcggcattcagtttcttcggcttcaccgatttaaaatattcctcagaggccagattcaccaccacccgatcgccctgcgcctcaagcgcttcgttgagcttatcggtaatgatatcgccccagaattgataaagatctttgccgcgcggattctccaggcgaatccccatctccagacgataaggctgcattaaatccagcgggcgcaatacgccatacaagccagagagcatacgcagatgttgttgagcaaaatcaaaatccgcgtcgttgaacgtttccgcctgtaggccggtataaacatcgcctttgaacgccagaatcgcctggcgtgcattatccggcgtaaaatgaggctgccagtcatgaaaacgcgtggcgttgagatccgccagtttgtcgctaattcccatcagcctggaaatttgcggcgccgaaagctggcgggcctgttgaataagctgctggctgtgatccaacagctccggctgggtatagcgggtcgtggccagcgggctttgataatcaagcgtttttgcaggtgaaatcagaatcagcatattcagtccttgcagggaattttctgcgactttagcaaaaaaacgccgcagagttgaccgatggttgcgattgtcggcttaatcgcgcgatgccgcatcccaggtatctggcgccagttgtggttcgatatccgggaagcgccgcggatcgaactgcggtcttacgcccagtttccgttgtcgcagataatcgccggcgagggtatacaccaccggtgagagcaacaaaatcgccgtcagattggtaatagccatacaggccatgatcatgtcagcgagctgccatatcagcggaaaactgatgagcgtaccggcgatgaccatgccaagcgtcgcaaggcgtaatagccagatggcctttgcgttatgtaaccgcagaaaaaacagattgttctcggcgtaaatatagttggcgacgatagaactgaacgcgaacagaatgacgataagcgcgacaaaactggcgccccattcaccggtcaacgaaaccattgcatgttggagaagctgaatgccttctgttgacgaatgggacgcgtgattccccgccagcaggataatcatcgcgctggcggtacagatgataatggtgtcgctgaatacgccaatcatttgcacaatcccctgcgcgacaggatgaggtggatacgacgttgccgctgcggccgcattaggcgttgaccccattcccgcttcattagagaacatcccacgctgaaaaccgctggtaatagcctgggtgagcgtatatccggctgcgcctgccgcggcttcctgccagccaaatgcgcttttgactatcgaggcgataacgccaggcatttgctcaatatgccagaggcaaatgaatacgctgccggcgacccacaataacgcgatgatgggaatcagccattgcatcagacgggcgacgcctttgatgccgcgaatgataattaacagggcacagaacgccagagcaatgccggagataagcggcggaatgttgaaggcgaaatggagcgcgcgtgagacggcattcgcctgcacgctattaaaaatcaacccgtaggcgacgagcagaaagagggcgaaaaccacgcccatccagcgcattcccagcccacgcgccatataccacgccgggccgccgcggaactggcctgtcgggtcacgttctttataaagctgggcaagcgaacactcggcgaaggaggtcgccatgccaatgatggccgagacccacatccagaataccgcgccgggaccgcctgcggcgatagccagcgccacgccggccagattaccgctgccaatccgcgccgcgaggctggtacacagtgcctgaaatgacgtcaggccgcctggctgcgggctaaggctgcctttcagactgcggctaaattggcgaatataacgaaattgaatgaatccggtacgccaggtaaaccaacatcctgcgccgagcagcaggtaaatcattaccgagccccagagtatttcgttaataaaactgaaaaactcaggcattaacgtccctcttgttgatgccgtcacgctttgatgatcctgtataagcgtgacccatgatgtagatgaccttgtcagactaatattaacggcagtttatcataaatacggcggtatcctttaattgcgcatcaaccgtcggcagatacgcaaacagtgcacaagggcagccaggtgcatgtaggcggttgcgctgtgagtgcgtcgtgttatcatcagggtagaccggttacatcccctaacaagctgtttaaagagaaactctatcatgacggacaaattgacctcccttcgtcagttcaccaccgtagtggctgataccggagatatcgcggcaatgaagctgtaccagccgcaggatgctacaactaacccttctctcattcttaacgcagcgcaaatcccggaatatcgtaagctgattgacgatgctgtcgcctgggcgaagcagcagagcagcgaccgcgcgcagcaggttgttgacgcgaccgataagctggcggtgaatattggcctggaaatcctgaagctggtgccggggcgtatttctaccgaagttgacgcgcgtctgtcttatgacactgaagcgtctatcgccaaagcaaaacgtatcattaaactctacaatgatgcgggtatcagcaacgatcgtatcctgatcaagctggcgtccacctggcagggcattcgcgcagccgaacagctggaaaaagaaggcatcaactgtaacctgacgctgctgttctccttcgcgcaggcgcgtgcgtgcgccgaagcgggcgtctacctgatctcgccgttcgtaggtcgtattcttgactggtataaagccaataccgacaagaaagactatgcgccagctgaagatccgggcgtggtttccgtaacggaaatctacgagtactacaaacagcatggttacgaaaccgtcgttatgggcgcaagcttccgtaacgtaggcgaaattctggagctggcgggctgcgaccgcctgactatcgcaccggcattgctgaaagaactggcggaaagcgaaggggcgattgagcgtaagctctctttctccggcgaagtcaaagcgcgcccggaacgcattaccgaagccgagttcctgtggcagcatcaccaggaccccatggcggtggacaaactggcggatggtatccgtaagtttgcggtagaccaggaaaaactggaaaaaatgatcggcgatctgctgtaatcattaacgcgtggccctgatatgggtcacgctacctcttctgaaacctgtctgtccttcccttcgcagtgtatcattctgtttaacgagactgtttaaacggaataatcatggataccttacgtattggcttagtttctatctccgaccgcgcttcaagcggcgtttaccaggataaaggcattcctgcgcttgaggagtggctcgcttctgcgctgaccacgcctttcgaggtccagcggcgcttaattcctgatgaacaggaaattatcgagcaaacgttgtgtgaactggttgatgagatgagctgtcatctggtgctgaccactggcggtaccggtccggcgcgtcgcgacgtcacgccggacgcgacccttgccatcgccgaccgtgaaatgccaggttttggcgaacagatgcgccagatcagcctgcgctttgtgccgaccgccattctttcccgccaggtgggcgttatccgtaaacaggcgttaattcttaatctgcctggacagccaaaatcgatcaaagaaacgctggaaggcgtaaaagcggacgatggcagcgttagcgtgccgggcatttttgcgagcgtgccgtattgcatacagctgcttgacgggccgtatgtcgaaaccgcgccggaagtggttgccgctttccgtccaaagagcgccagacgtgagaatatgtcgtcctgaccgggagatactgatagtagggttattcctcccggtgcgggaggaataaaagagatttagtgcgcctcgccgattggcagaatagtgcggccaaattgctcgtttagcacttcacccatcgccagataaatagcgctggcgccgcaaaccagaccaacccagcctgcgatatggataatggcttcgttaccggtgatattgccgaccgccagcagagcgaacagtacggtcaggctcaggaaaacaaattgcagcgcgcgggcggctttcagcgtaccgaagaacataaacagcgtgaacacgccccacagacctaaataagcgccgagtagctgagcgtcaggcgcatccgtcaggcccattttcggcatcagcaggatagcgaccagcgtcagccagaacgaaccgtaagaggtaaaggccgttaaaccaaaggtattgccttttttgtactccagcagaccggcaaaaatttgcgcgataccgccgtagaaaatccccatcgccagaataataccgtccagggcgaaaaaaccggcattgtgcaggttaagcagaatggtggtcatgccgaagcccatcaggcccagcggtgccggattagccaacttagtgttgcccataattcctcaaaatcatcataattgaatggtgaaatagtttcccagaataacgagttccgtattcggggcgcggcataataatcagggggaagaggactgtctatgatctaataagggggaaaagaaaatatttcccccagtgagggcattcacgcctgaacggctgccatcattcgtcgcaggcaggctatttgcaacactgccggaatagtcacgcgatacgcgctgccgctcatcgctttgacgccgtttaacgccgcgccgaccgggccgccaagacctgcgccgcgcagcaatccgtggcccaggatgctcattgcggcatgggtacgcaaaatgcgggtaagctgggtggaaagcaggtgggagaccccttttgccagactgcgatctttcatgagcagcggcagcagttcttccagttcagaaactttggcgtctacggcttgcagaaattcctgcttatgcgccgcgtccatcttctgccaggtatgacgtaaaaaatgctccagcagttgctgttctatttcaaacgtcgacatgcttttatctgctttgagttttagccgttttgcgacatccagcagaatcgcgcggtactgttttccgtgcccgcgcaatttgttggcgatactgtcgccgccgtaatgctgaaactcgccggcaatgagctgccagttacggcggtgttgctccgggtgaccttccatcgctttgaacagctcgttatgactaaggacgcttgacaagcgagccttgcccttttcgttatgcgtcagcaaacgggcgaaatcggcgagttgttcttcgctacaatgctgaagaaagtctaaatcctcgtcgtgtaaataagtgacgttcattttcagtctggcttttggaatagaaataacagcgattaatcgtcgccaatgactttaagtctcgccatatcggaagaatttaccgtatggcctgagaaggtaatctttgatacgcagcgtttgttgtcgttatcgctattaatattgatccagcctgtcgtctggccttctttgattgaggaagggacgttcaggctttggctggcgctacgcgcagttttaaaatagacggatgcgccgctaagttcgatgtcgccgtgatccgccgtgagttgaatgcgcttcacgatgcggcagacgggaatttttagcgcgagatcgttcgtttcatttctgggcatggcaataacacccagtattttatggtcgttcgcgtgcgcgacgctacttaacgccaggccgaaaagcaggccggcggaaatcgttaacacagatcgcatggaatttctctttgacgggttcaataagcaattaccgtctatcatactctgctcatgacaacgattcagttttgtaatcttttctttttattacaatttttctgtgaatagtattcgttgtttaatttatttcatgaatgtttgtttgtctggttttccatcgcgccctctcgtcactaaaaaattttttcatctcccccttgatgacgtgggttacgaccccatcttgtagtcaaccgcagtggtgagtctgaaaaaaaacgattcagggtagttgaaaccgcacgtttcgcccttattacagattcacaaccacatgatgaccgaatttttagtggagacgtttagatgggtaaaattattggtatcgacctgggtactaccaactcttgtgtagcgattatggatggaacgcaggcacgcgtgctggagaacgccgagggcgatcgcactacgccttctatcattgcttatacccaggatggtgaaactctggttggtcagccggctaaacgtcaggcagtgacaaacccgcaaaacaccctgtttgcgattaaacgcctgattggccgccgcttccaggacgaagaagttcaacgtgacgtttctatcatgccgtacaaaatcatcggcgccgacaacggcgacgcatggcttgatgtgaaaggtcagaaaatggcgccgccgcagatttctgccgaagtgctgaagaaaatgaagaaaacggctgaagattatctgggcgaaccggtaactgaagcggttatcaccgtaccggcttactttaacgatgcgcagcgtcaggctaccaaagatgctggtcgtatcgcggggctggaagttaaacgtatcatcaacgaaccgactgccgcagcgctggcttacggtctggataaagaagtcggcaaccgtactatcgcggtttacgacctcggtggtggtactttcgatatctctattatcgaaatcgacgaagttgatggcgaaaaaacctttgaagttctggcaaccaacggtgatacccacttgggtggtgaagacttcgatacccgcctgatcaactacctcgttgacgagtttaagaaagatcagggcattgacctgcgtaacgatccgctggccatgcagcgcctgaaagaagccgcagaaaaagccaaaatcgagctgtcttctgcgcagcagaccgacgtgaacctgccgtacattaccgcagatgccaccggtccgaaacacatgaacatcaaagtgactcgtgcaaaactggaaagcctggttgaagatctggtgaaccgttctatcgagccgctgaaagtcgcactgcaggacgctggcctgtccgtgtctgatatcaacgacgtgatcctcgtcggcggtcagacccgtatgccaatggtgcagaaaaaagtggctgaattctttggtaaagagccgcgtaaagacgttaacccggacgaagctgtggctatcggcgcagcggtacagggcggcgtgttgaccggtgatgtgaaagacgtactgctgctggacgttaccccgctgtctctgggtatcgaaacgatgggtggcgtgatgactccgcttatcaccaaaaacaccaccatcccgaccaagcacagccaggtgttctctactgcggaagacaaccagtctgcggtaaccatccatgtgctgcagggtgagcgtaaacgtgcgtctgataacaaatctctgggtcagttcaacctggatggcatcaacccggcgccgcgcggtatgccgcagatcgaagtcaccttcgatatcgatgctgacggtatcctgcacgtctccgcgaaagataaaaatagcggtaaagagcagaagatcactatcaaggcgtcttctggtctgaacgaggaagaaattcagaaaatggttcgcgatgcagaagcgaacgctgaatccgaccgtaagttcgaagagctggttcagacccgtaaccagggcgaccatctgctgcacagcacccgtaagcaggttgaagaagcaggcgataaactgccggttgatgacaaaaccgctatcgagtctgcgctgaacgcgctggaaactgccctgaaaggcgaagataaagccgctatcgaagcgaaaatgcaggaactggcgcaggtttcccagaaactgatggaaatcgctcagcagcaacatgcgcagcagcaggctggctccgctgacgcttctgcaaacaacgcgaaagatgacgacgttgtcgacgctgagtttgaagaagtaaaagataaaaaataatcgccctttgaacgggtaattactggcacgggcgaagaggtttcctctccgcccgtgtatgcatgttaagggcagataaaaagagatggcgaaaagagattactacgagattttaggcgtttccaaaacagcggaagagcgtgaaatcaaaaaggcgtataagcgcctggccatgaaatatcatccggaccgcaatcagggtgataaagaggccgaagctaagtttaaagagattaaagaagcctacgaagtgctgaccgatgcgcaaaaacgcgcagcctacgatcagtatggtcacgccgcgtttgaacaaggcggtatgggcggcggatttggcggcggctttaatggcggcgctgatttcagtgatatctttggtgacgtttttggcgatatctttggcggcgggcgtggtcgccaacgtgcggcgcgtggggctgatttgcgttataacatggatctcaccctggaagaagcggtgcgtggcgtgaccaaagagatccgtattccgacgctggaggagtgcgacgtttgccacggcagcggcgcgaaagctggtacgcaaccgcaaacctgtccgacctgtcatggttctggtcaggtacagatgcgccagggattctttgctgtacagcagacctgcccacactgtcagggccgcggtacgctgatcaaagatccgtgccataaatgtcacggtcatgggcgtgttgaaaagagtaaaactctgtccgttaaaatcccggcgggcgtggataccggcgatcgtattcgtctggcaggcgagggcgaagcgggcgagcatggcgcaccggcaggcgacttgtacgttcaggtccaggtgaaacaacaccctattttcgagcgtgaaggcaataatctttattgcgaagtgccgatcaactttgcgatggcggcgctgggcggtgaaattgaagtgccgacgttagatggtcgtgtgatgctgaaagtaccgagcgaaacacaaacgggcaagctgttccgtatgcgcggcaaaggcgtgaagtccgtacgcggtggcgcgcagggcgatttgctgtgccgtgtggtggttgaaacgccggtcggtctgagcgaaaaacagaagcaattgctaaaagatcttcaggaaagttttggcggcccgacgggagagaaaaacagcccgcgttcaaaaagcttctttgacggcgtgaaaaaattctttgacgatttgactcgctaatctttttcccgttgtatttttcttcagcccgggtgtatatccgggcttttttctgcctgtacgcgcccaggcttctgttaaacgcatcgtatcctctcatttgttgatattttgtttttactgataaacaaattgatgttaatcagcagttttgtatacgcttattctttaaaaaaacgtgatgtgatgacattaatgattgcttttttagatgctgtgaattgatttatcttgagtattatctatattgctttttttagtttccggaggcagacagcgaatgggatcgaaaggtgccaacaagagctttgattataatttaatcaaaattcttgacgctgttattttgtcaggaaatgcggctatggcggcaaaaaagttaggcattacaccggctgccgtttctctggcgttaaagcgcctgcagagttattacccggaagaactgtttagcagagggaaaggcgggctcatccccacagctaaggctgtcgacattcaccaaaatttcagtcaggtgatgaaactggtggatgacacctttctctgtaatagtaaaaaagatgaagcgttccagataacgttattaggcagtgatattgttgaaagctattatctttctcagctctataacagcgatatatttgaccgtattttgataaatcatttcactgtcagaaatatgagtcgggagcatatcagcgaacttctgtttactgcgcaaggcgatctgttgattagtgccgaacctttgctggagtccggcatagagaatcaaattattgatagttttaaatcatttgtttgtatctgtagcagtaaacacatgctgagtaccctctcacaactgtcgctacatcatttttattcttcgcgtcatgcgttatatcagccggggatgggggcttcagtgatatatcatgatagtgaattatttaaggatgagctttactatactggcaggcgtattgtcggctatcgcagtgattcgcttaacggtttgatgagcatgatcgaacgaacctcattgattgcattgatgcctttgaaattagcgcttttttataaaaatcatcgtaaatatgacattaaatttattcagcctccgcccgaactggctttgaagtcagttcaggtttatgcatcctggaataaaaatagtagaaatatatcgacgattaatgagatggtaagtatgttacaaacgctttcctccttccgtcgttaatacacctcatttttacgctttgatttaatatggttttaaatgatgtgctttgatttttaccctcctgacagggcgcttacactccttgtgttaattattaatttataatgatttcggagtgttaaaatgtctattcccaaccatgtgtcgacaacggaagttgtgctattggagctagagatcttactcactattatttcgattggcgcgtggggaggctttgtcagctatcttttacgcaaagataagacagaatataatagttctcatgaaagtattaaatattgcttaacgcagatcgtgatttcctgcttcaccagtttcttgttaagcgcgattgcgatcgaaaaagaatgcagtttcaacattgttctgttggcggcaggcttaggcggtgttttcgcgagtccgatcttaaagattcttgggcggcggattaaaaaaattatcgaaggtaataattcagattaattatcatttgcagtatcaggctcatccgtgagccttttacgcgtcttttttcagcctggtctaggtcactctattcttgatccagccataaataaattgttcgttattgtggtttttctcagcaacgtttaagtagtacgtgccctgactgcaattgagggctttcaccaaaacggcttccccttcctggcctcgccaggccaaataatgttcgagagcggcaagcgtccgcgggccaatattgccatccacatgaatatccgggtagcgtttaccttcgtgattaaagacgttcaaccagcgttgcagccacgcgctggggtggtaagcgcctatgttgactgccgcatcgcacagctcgaaggagactggccacgatagcgtcgagatgacgtcaaaacctggttttatccagtaatcctcttcgagaatcgcgtaggcttcagcgtgggtcagatcccgcatatcgccagcatagccatgcgctcgcgccgtggcttcggtaatgccccaatgggtggcgccgcctttatctttagggttaaatacgtaaccgccttcaagcgcaataattccatctataattggattcatcttccctttccttcgcttagtgaatatgcagatacatgagagaacctaacgttactgaaaatacggtcgtcagggcggcgatggtttgccgtacaatctgtttttttcttccctttgtttcgctatccgtcgcgataatggcgatatcactattcactttgagaccttgtcttggaatggtaataaaaagatcgttaataccaagcgctttaaggtcacgtctgattaaatagagaatctgcgttagatttgcatcattaacataatggcttcgacttccccataacgcagtggttattttttgtcgctcgataatctccagatgagcattctcgatgatgaaactgagacatttggctctcatcgcagtcattttaataacctgtgaatttgagaccgtcctcagttcatatttaccttcattgtaaatgcaattgctattaatgatataagttttcataacgtcttcctttagaaatgtacatcctggttgtctgtggtgactatattgtatgagaaatgtcttaatccaataaatgtcactggttttattgtattgtcattgtctatagcgagtgtaatcacattatttcattgtaattaaatgatatttaattacatgataaatgatatttactatgttctcaccagaacggagtaagcgggcgctgagaggtgttgttttctcttcgttagacggtgttgttaacctcatttttatgatttttatatcatctaaaaagatgatgttttgtgattagctattttttatgcctgtaacgattatggaccccgcagaacgagctgcgacaattttgaaacgtaaaaggaaatttgaaaatggctacaagcaaactgattcaaggcgatacaattactgaaactactcatgcagcgaatggttttgaccctgcaacaagcgatgataaaataagctatacttccgctcgtgttgcgaaaccggtatacaataaatataaaaattccacgactaaaccgaaggtattcggttattacaccgactggtcacagtatgacagccgtctgcaaggcaatatgtcccaaccgggccgtggttatgatttaaccaaagtttcaccgacggcttatgacaaactgatttttggctttgttggcatcaccggtttcagaaaaattgatacagaagaccgcgatgtcgtagcagaagcggcagcgctgtgcggcaaagtgaaatatgagccgaccttcctcgacccatggggcgacttccagtcttatatcaacctcggctttgatgtcagcggctgggatgtggatccgaagactgtaactcagtctaacgccaagggtctgctgggcgcgctgcgtgatatgcaggcaaaagcgaaagccgcaggtcacacgctggcgctctccatgagtatcggcggctggagcatgagtaacgggttccacgaaaccgccgcttctgactcttctcgtaaaatcttcgccaaaggcgtggtgaaactgttcaaacagttcccgatgttcagcgaagtggatattgactgggaatacccgaacaatgaaggggcgggcaacccgtttggtccggaagatggcgctaactacgcgctgctgattgccgaactgcgtaaacagctggattccgctggtctgagcaatgtgaagatctctattgccgcttctgctgtcactactatttttgactatgcgaaagtaaaagatctgatggctgctggcctgtatggcatcaacctgatgacctatgacttcttcggtacgccgtgggcggaaactctgggccaccacaccaaccgcaaagcgctggaagagggcggctgggctgtcgaaaccatcgttgatcacctgctggcggaaggtttctccgctgaccgtatcaacatcggttatgccggctatacccgtaacgctcgtcaggtagaaattgaatccctgtcgccgctgaaaggttcttacaacccaggttcaggccctactaccggttcctttgaatccggcaccagtgaatggtatgacgtcatttatagctacctggatctggaaaaccagaaaggccgtaacggtttcaacgtttacaccgaccaggtcgctgacgctgactacctgtatagcccggaatccaaactgtttttatccctggatacgccgcgtactgtcaaagcaaaaggcgaatatgcagcgaaactgggcctgggcggcgtgtttacctggactatcgatcaggacaacggcgtgctggttaacgccgtgcgtgaaggtctgggttatgaaatcgaatctgaagttatcgatatggaaccgttctactttgaaggtatcaatgtagaaaaagatgaagagcagagcgacagcgacgacgcgcagaaggtcaaccacgcgccgaaagcggcgattgaactgctggtcgtaggcggatctacggtacagctgtctggcgcaggttcttctgatgaagataacgatgagctgtcctttagctggggcgtgccttctcaaatcactgtggcagacaaaacggctgaaatcattgaggttgtggtaccggaagttagcgaaaaaacagccttccagttcaccctgtttgtacgcgactgctacaacgaaccgtcctctcaacagcgctttgttctgacggctgtgcctgcgctatctcaggttcaaccggaaccggaagaggaagaagatattatcgttcctgtaccggacgaggaagaagataccacaccggctgaggatgatacgccagcagatgacaaaacgtcaccttacgcgcagtgggatgcttctaccgtttatggcgcaaactggggttctttcgaaatcgttagctggaaaggccataactatcaggtgaaatggtggtctatgggcaaccagcctgacctgaactgcggtgtcggcggtgcatggaccgatcttggcgcttactaatacacggtattaagccgatgtattgggcttcatgattcaagccccggtttaccggggcttttctccaccagggacagaggaagagtagaccatgaccatttccattcacgccagcgcatttgacgtcaacagctggtatcaaaaaatcaccttaaccttcatcaatgagagcggtaatgcggtcgatatgaaccatgccgcaatatcattcacggcttccgggcacatcgatccatggggaaatagcggcggtacgctcaaagggaacctgccgcttacgctgaatgagagttcgtatggcacgctggaaactaacaacatcatcattaataacagcgatgcattacttcttcagccgggcgaacgcgggacgctctctttcagcctcgcggcgacgcaggtgccggtaaaaatgtccgccatcaccttgacgctggcgtcatcgtcatccgaagacgcagagtctgaaaccccatccgatcaggagacgccagcgatacccgccgcagacgaacaactcgccgaacccgatgtgccggaaaaggacaatgatcttcaggaacacggccttacgcttaacgttagcgagttgaataccgcaagttggtatcaacgcgtcacctttacgctgaccaacctctacgcccaggcggtagatctcaatcagcttcaactgaattttacggccagcgcgcaccccgatccctacagtccgtttcagggaacaatgttggggaatcaggccgtgacgctggccagcgatgggggatggcccatcgagaagaataccatcaccattaatcatgacggcgcgctgatgctggcggcgggggataccgccgaattacagtgctatctggccgccacgcagacgccagttgccatcagcgatttgaacgcgacgttggcccatgatcctgcccgtcagggaaaagtttgcgttcattttcctgccatgacgcagaccgtggcgctcaaaccggtgattgagctgctgtttcctgccggcgaaacccggcgctttgtcggtgagtggggcgaggttctgacaataggcgatcttagcgcaggaacgtatcggcttaccgtaccggtactggcgaatgatgagatgcaaatcgcgccagtcgagtcctcttttaccgttacgctgcaatccggcgatgccgccgcgcaggtccaggtatcctgtctgccgattgtccgttatgccagcgcgcgtctgatgattgacgcccctgcgcttggtaatgcgaaattgaccgttgagatcgccgatgctacgcaagcggatgagcgtaccgtcacgctgatcgccaaccaaccgcagttaatcacccggctactggcggggcatcattatacggtcaatctgcagcctgcgatgattaataaccgctttatatcggcacccatacagcttacgggatttatccctgctgcggcgcagattgccgaggttgctgtcgcttaccaacagtcggcgctcgacacggcgagtttcgtgacggtggatgccactatactgggcctgcccgatggcgtcgcgccgcagcgttatctgttcagcagcggtaaatatcagtactcattaatgctggagagcggcagcgatcggcagacgttggcattacgctttgcgcccgggctgtatgatgttcagacggacgatattttcatcgacagcgtgccgtggcgttgtgaacaggccgggccgctacggttgttgcaaaaggtcaaccatgtggcgctggagtttctgcccggcgtgacgctacaggtaaaaggttggcctgattaccttgctcatggcggcgtgacggttaacgcgccagagacggtttctctttatcgcgatataccgtttagcgcgttgtttaaatacgatggttttgacggcggcggcgatccggttccggccgcggaggttgacgtgaacggggatggttttctggattacgcgacgttaccgatccataaaaccgttgcgctggtgcgccagatagaaaaagaagccgggcgtagcgtcatgccggtaatggtcatttataccgcgaatgccagcggcggtagcgcgctggcggatttacaggatgcgcaaaagctacgtaaccattttggtaactttattacccagtgtctggcggcgcagtcatacaaagatgagacgcatcctgtcccggccacctttgtgcttaacccggattttctcggggcgctacagcaaggaccgtatggctataccgtagtacggcaaaaaaacagtgtgccggtgaatgcccaactggcggcggcgatacaagcattaccggcgatggctggctttatcgtgccttcgttgccgacgtttagcgacgatctctacggctatattcaggcggtgaactatcttgttcgtcagtttgccccggatgtggcttttggctggcagacgaatgtctgggcgacaggaacggcggactgggtgttgcgcgataccgctgatccggtagctgaagggcaggcgatcgccggatttattcatgaactgggcgtttacagcggagaatatgcgccggactttattgcgtttgataaatttgagcgtgactgtttcagtcctgatgcgcttgcccactatggctggaatgcgacatgctggcttaattacctggcgatggtcaaacaggtgacgaaagcgctgctgacgcccgccatgctgtggcaaatccctggcggccatatgcctacagtagaagagggcgtcagtaaaatcagcgctgcgcactttgcatccggcggaaccttttttatgggggacgcccgcattggcagcgatcctgacacgctctctttgcagctactcaatacggccttaaatagcgcgacttacggcgtcccgaccgtcggcgactttttacgtaaagataaagggtatgactggggccagatgcaggcgctgaatctaccggactttaacgtcttttcgatcttatggggcggtggttctactatcagtattacgacaatccattctaacggtgaagacggcggctggctggcggataaaatggtagagtattatgctgcccctcgctatttcagataatatcactgcttatttgcattaatctggactattagtttgagattcgaaggcgcgttctttcgaatctcttttcctgcgccccctgacctctcattctttatgcgtaatttgttattaattttctgtaatcattttgtattaagaattgtcttaatcttaaaaatattgcgtattagtgcgttgtgaatacagaaatactgcatagcgatgttatttattattaatttaagtactttttgagaggttatactgtgacgctacattgagtagacaaccgttaatgaaaaaaatgatgaacgacgcttttgctaaagataataatgagaattcattacactcttttcttttttctcagcaggctaaacctcacgcggcaattgatgccttattttcggccttgttgccatttggtcaaccgtttacgctgggtatcggcgatgagttttatttacaggcaaatgatgaacactacattgtattactggagtcaggcgttgtttctttctgtcatgatgacaaacgactccatatatcttcatcgtttgcgccatcggtcgtgggtatggttgacagctatggcgctacctataacgtccccgcgcgaccggaacactttttgctcgcagaaacggtttgtaccggtagatttgttcgcctgccggattttataaaaatcgccgatgaatgcgatttgtggcacgacgtggcccgttgtctggcttaccgtctgatggtgatgagcgcgcgcgatcgtgaattagtcggcgtcgattcttatctgaaagttcgggcgctgctgactgaaatctgggcttatccacaggcctaccgggaaagcattatcgtgttgaattttattcaacggcgtaccgggatatcgcgcagtcggaccatgaagattctgtctgaactaaaaaaaggcgggtatatccatattgataatgggcggctgacggcgctcggaaaactgccagtggcgtattaatgcactatccgcaacgatatatttacatatctcgactgaatttgcctggtatcgttaatagaatgttttactgaaggttgttatgaaaactatttttaaaaagtcaatatggctaaaggagataggccgaacgactggtgtaaagttaatataaaacaacatgttatgcctggtcctataaaaccaaatgtcgatgattgcaacttgccgttggcttgctaataattaataacatcgttatctcattataacgtaaagattaactcacgacgttgagtggctgttttattgcctctgacatttatatcagaacaagaagacactttttttcgcataagaaaaagtcgtgatattgctgtgaagaaatatcagcagccgtttcgttaaaaaatctgattaccctcatttttatatttaaaaggagcttgaatgaaaaagcctgtactagcattaatggtctctgccattgcctttggcggaatgttgtccaccgcgcaagcggatactacaaccgtcactggcggtacggtaaattttgtcggacaggtcgttgacgctgcctgttctgtttccgctgactctgtcgatcagaccgtgacattaggccaggttcgcgccagtaaattaaccgaggccggtatggtggcgaatcaaaaagaagatttcaccatcaaactggaagactgcgatactcagaccagccagaatgcggcggtgatttttaatggccaacaggacgcaaaccagccggggtcgctggcgaataccgctggggcaggttcggcgacgaatgtggcattacaactttatggaccagatggccaggcgctgaatatcggtgaatcgtccagtactgttaccttgaacgatggcgaaaacgttattccgcttagcgtggattatatcgctaccggtacggcgactgccggtaatgttaccgcgacggcgacatttagcatggtttattcctgattccttatcgggatttttttctcgtctgttgggaggcgagaaaggggcgttacgcgcgtcactgcgcgtaacaaaccgacggcatcaggatattacgcagatgaaaaaaaacgtaccgattttccttcgattattgctactgctgtcggcggccggcctgtcgtttgccgtgcaggcgggaggcattgcgctgggcgcgaccagggtgatttatccgcagggaagtaagcaaacctccttgccgattattaattcttctgccagcaatgtttttttaattcagtcatgggtcgccaatgccgatggttcacgctcgacggattttatcattacgccgcctctctttgtgatccagcctaaaaaagaaaatatattacgtattatgtatgtcgggccgtcattaccgaccgatcgcgaaagcgtattttatttaaacagtaaagcgataccctctgtcgataaaaataaattgaccggcaactccctgcaaattgcgacgcaaagcgtgattaagctatttatccgcccgaaaaatctggcggaggcgccagctcatgccccgtcgacgcttcgctgccgtaacgagcgcggccagctaacgattactaacccttcgccgtactacgtttcgatggttgaactgtacagcgcggggaaaaaactgccgaatactatggtaccgccgaaaggcgcgatcactctcccggcgacgcccggccaggtatctttgcgcacggtaaacgattttggcgcaacgacgccagcacgcgtttgtccagcttcatgatgttatgcgtaatcagcttttcatgacgcgatattactccagcgtaactaaacccgtattaaccccgctggcgttggctatcgcattggcgcctgcgccggggtgggcggaaaactatttcaacccggcatttctgtctgacgacccgtctgcggtggccgacctatcgaccttttcccgtaatgcccaggcggcagggatgtatcgcgttgacgtttacctgaacaatacgtttctcgcgaccagagacattgccttccaggcggtgaaaacgacgggaaaaagcgcgcccaccgatgacagcggattacgcgcctgcctgacgcctgaaatgcttaaaaatatgggggtaaacaccggggcgtttccactgttggcgaaggcggcggcgggaagttgccctgatctcgccagtgcgataccggccgcccggacccgctttgattttgcgcagcaacgtctcgacattagcatcccgcaggcggcgatggttgccagcgccagaggctatatcccaccgaaatactgggatgaaggtattaatgcgttgctattgaattacacctttaccggcgcgaatagtcaggatcggagcccaggcggcagtgcggagaacagctattttcttggattgaatagcggccttaatctgggggcctggcggttacgcgactactccacatggaacgcgaatagcggcgatcagaatagcgacagcgactggcagcacatcagtacttatctggaacgtgatgtggtctttttgcagggagaactgacggcaggcgatagttataccccctccgcattattcgacagccttccttttcgtgggctacaactggcgtctgacgacaatatgttgccagacagcatgaagggcttcgcaccgaccattcacggcattgccagaagcaacgcgcaagtgaccattcggcaaaacggctacatcattaatcagcgctatgtgccgcccggggcatttactattaatgatctctatcctaccgccgccagcggcgatttgactgtggaagtcaaagagtccgacggttctattaatcgctataacgtgccctattccgccgtgccgattctacaacgagaagggcggctgaagtatgcggcgacggtggcggagtatcgtagcgagagtagtcaaaaagagaaggtgaaattcagtcaggcgaccttgatatgggggttaccgcatggttttacgctgtatggcggaacacaactttccagtcattatcacgcgctggcgatcggcagcggcgcaaatctgggcgactggggcgcggtgtcgctggatgtcacccaggctaccagtacgctggcggataataacacctaccaggggcaatcgctgcgtttcctgtatgccaaatcgcttgcacagtcaggaaccaatttacagcttatgggctatcgctattcaacctcgggcttttacacgttggatgataccacgtggaaacggatgagcggctatgacgatgacagtcggactgacagcgataaaagcaggccggaatgggcggattattacaacctttattacaccaggagggggaaagtacaactcgatatcaatcaacagctaggcgggttgggatcgctttttattaccggcagccagcaaagttactggcacactgatgaaaaggattctttgttgcaggtgggatacagcgatacgctggcgggtattgcatggagcgtttcttacaacaataacaaatccgcaggcgatgcggagcgcgatcaaattttcgcgctgaatatctcggtgccgctaagtcaatggctgcaacacgatgatgaggtcacgcgccatcacaatgtttacgctacctttagcaccagtacggacaaacagcataacgttacgcagaatgcgggccttagcggcacactgctggacgaaaacaatcttagttacaacatacagcaaggttatcagaatcacggtattggcgaaagcggcgccgccaggctggaatacgatggcgcgaaaggcaacgccaacattggctataacgttagcgataacggcgattaccagcaggtgaattatggcctgagcggcggcctggtggcgcacgcgcatggagtgacactaagccagccgctgggcaataccaatattttgattgccgcgccgggcgcagccaacgtcggcgttgtcgaccagccgggtattcatacggacgcgcgtggctatgcggtggtgccgtatgcgacaacatatcgccaaaaccgtatggcgctggacgttaacgccatggctgatgatgtcgatattgatgacgcggtgactcgcgttgtgccgaccgaaggcgcgctggttctggcccgctttaaagcgcgggtcggcgcgcgtgccctggtaacgctgaatcataacggtaagcctgtaccctttggcgcaacggtgacggtgaatgatcgccatgcggaggcgattgttgacgaggccggggaagtctatctttccgggttgtcagcgcaaggcgttctgcacgttcgctgggggaacctgccggatcaacagtgtgtcgcgtcctatcatctctcttcctcccgtcagattctgagtcgacaacatgcggagtgtcattaaatgaaaatacctcttttatttgctctgctggcgggaagtgtcgtatcgcagtacgccttcgcagacgtgtgtaaaaacgttaacggcgtgccttccagtattaattacgatttaacgaccactctgacggcagaacaaaaccaggtgggaaagacggttcaactggaaaaaagccaggaagttaatgtacaggcggtgtgtcccgccggcgcgtcgacctatagccagacttatcgctcctatgtgtcgccatatccggtcgtagaaacgagcggtaactggaaatatttaaagctggacccggactaccttgaaggcggaatgcgaattgaggattcttcggcgggcgatatctatccgccaatgaacaacgttctgatgggatatgatgaaaatgtgaaagcgggtcaaccgttttacgttcgtgactcaaatctggagtttcagctcaaaattgttaaaccgttcgtcggcacggtgaatattagtcctaagactatgttcaatgtttatgtcatgaccgccgcaggcgatccgctgacagatgtcgtatacagcattctttatagtggaacggtgaccgtaccgcaaagctgtgaaatcaacgccggacaaacgattctggtaaatttcggcgcattatacagtggcaatttcaaccatgcaggccaaaagccggagggggtacgagcgaaaaaattcagcgtaccggtaaagtgcagcggtctggattcgcaggtcaatttaacaatgcgtcttatcgctacgccggatagccacgttccccaggctatcgcttcggataatgccgatgtcggcgtagtggtcgaaaccgatgaaggaaacgcgcttatccccaatgatgcacagagcgtcgcgccttttatcaccgatagcgccggacgcgctaacatcacattgcaagcctacccggtaagtacaacaggcgaaacgcctgcggaaggggcgtttaccgcactggccagcctgcgagtggactttgactaaatgaacagatcacactgcgctctttttgccatgggactaatgctgtgtccgcaaatcaatgccagcgctgacgacctcgcttataacctcgaatttaccggcactattgtggcgcaaacctgcgacatagatatttccagtctcagtcaaagtattgatttaggacagtttgcggttggcgactttccttcgacaggaacaacgacaaaatttaagccctttaatatcaacctcaaaaattgttcccgaggaattgccggggcgaagatctggtttaccggcgaacccgatccggacaatcccgcgctactggcgataaccgacaccgggatgggaagcggaaacatgttagcaagcggggttggggtggaaattctgaatgatgatcaggataccatcagtatcaataatgccgactcggtggtctatccgttgaaagccggacgcaacacgctgtctttttatattcgctataaatcgacccggccgacggtcacgtccgggaacgcgacggcggtcatgtatttcgatatgcagtatgaatgaggagccatcgtaattatgcgtaacgatatcctgtacggcatcgggatgctgctggcggcatccggcgtccaggcgcacgatggccgggtctatgtttccggaaccatcacggacaatacgtgttcgctctctcctggctcggaaaatattaacgtggcgatgggcgcggtttctcaacggcagttttatcgcgcgggcgacggttccgcatggcaaccttttgctatcgatttacaaaactgcggcagcactgccagcggcgtaacggtcagttttagcggtgcggcggacagccgtaatacggatttattggcgcttaccgcaggggaaagcgacgcttcaggcattgggattgcgctttatgatcaaaataaaactttaatcccactggggcaagagagtgatgtggtgacgctcagtccgggtcaggcgtcggcgcatctgcaattttacgcgcgttatcttgccgatggcggcgcggtaacgcccggggacgccaatgcctccgcaaccttcattcttgcctatgaataagttctttttacgctgcgcgatatattggtgcttgcttcccatatcatgggcgcaggctggcgtggtaattggcggtactcgctttatctatcatgcgggcgccccggcattaagcgtaccggtaagtaaccattcagaagcgtcctggttaattgatacgcatattttacctggtggccgctggccaggaaccaaaaacgaagggaatatcatgcccttcgtggtcacgccgccattatttatgctttcagcgcgccaggaaaactcaatgcgggtggtttataccggcgcaccgctacccgccgacagggaaagtctgtttaccttgagtatcgccgctattccctccggtaaaccggaagcgaaccgtgtacaaatggcgtttcgttcggctttaaaattgctctatcgccctgagggactcgccggcaatccgcagcaggcctaccggcatctgatctggtcgcttacccccgatggcgcgacggtacgcaatccgacaccctattacgttacgctctttttattacgcgctaacgagcgcgcccaggacaacgccggggtcgtggctccctttgcaacgcgtcaaacggactggtgccggcacacggttcgctgcactgtgcgctggcaaagtattaatgactatgggcgggtaatgacagcgcaaaccgtggatctgacgcgtattcattaactttttttcaggcgtctcccgatagcgggaggctttccgaacttatcgaacgagacttttattatgtattatcacgcgttaaaactttcccgactggcgatgttgacgttggcaggcgttgccgtatccgcctcggcaatcgccgccgattctgccccgacgtcgcaaattggcccgacggcggaagcctacatcgtcagtcatccggataaagtgggagaggtggtggcaacgtatttggccgaacatccggaatttttggtcgccgccagcgagacgttgcatcagcgtcagcagattgcgcaacaacaggcgtatgttcaactggcattacagtatcgtgctgagttgctcagtagcagcagtccttccgttgggcccaacgaggcaaaagcggcggtggtgatgttctttgattaccagtgctcgtggtgcagcaaaatggcgcctgtggtcgaaaacctgattaaggcgaacccggatacccggtttattttcaaagagtttcctattttttcctcccgctggccggtatccggactggcggccagagtcggcgaacaggtatggcttacacagggcggggcgaaatatctcgactggcataatgcgctttatgccacagggaaggtggaaggcgcgttaacggaacacgatgtctacaccctggcgcaacattatctaacgccgacgcagctggccgccgtaaaagaagcgcaaagcagcggtgcagtacatgatgcgctcctcactaaccaggcactggcgcagcatatggactttagcggcacgcctgcttttgtcgtcatgcctcagacgcaagacggtgatgtaaaacgggtgaccgtgatcccgggaagcacgactcaggatatgttgcaaatggcgattcagaaagcgaaggggtgatattcgctcagaggagaacgcacaggagtgaaagtaaaatgaagtctatgcgttgcgtcataccggtgattttactttcctttatcgttcatgaagggacagcgaaaccgaccgctcagattcattttatgggatcggttgttgaggcaggctgctggaatgacgtaggaaccttagaaattcaatgccataataaagagggagttgaacgttatattattgtcgagaatattatcacgccgatatcgtctcctcatgcaacggtaaaacgagattatttggatgaagataagcaattaacagtgctacgcattgtctatgactgaaccgcgtagcagaccgcagatggtgtcccgtcagtgtcgtgtgaggatattatgaaaaatgttctcaccttcccgggacacggtctacagactttatcttcagataaacggcgctaaaaagaaaagcacgatcaataaaaaaagagtgggaataccaatggatataattttattacatcggtgagtatgatattgaatagcttgtggcggtatgtcagcagcgtcaatgataaatctttcatcgatttttatcccctgcctggggagcgtaacaaacagttcgaaaagcccgatttgttgtaaatctcgtcgcagcagataaagaagttgcgtcaaattagcatcgctaacaaattgacttcgctctccccaaactgcgtgtgaaatcatctcccgcgtaatcagtttcttgtaggcattttcaaaaagatagcttaaacaacgcgcacgcattagcgtcacctttagcacttttttatcatgtaatgatattatttctcttaacgactcattataaataaattcgttattaatagtatattgtctcatgaattcactccgttttgatattcataaggtacgtttgacactgtcagtgtgttcactggcggtaaagtactccttacatcagtacggataagcgtagagaaccgcaaagaaataagagaatcatttgtgattaaacaggataatattatgcttttttataaagtgtgccagatgtttttgatgttttttataaaatggcatcatgtgtttttatttcacacaggctgaaatgatatcaataaaattataatttaataacaaacagatagaggaaatgatttacttattgaaataagtgtggtgcaaggttaatctgcgccttaaatgatggtgccagattataccagccaggataacctatatgcggccaataaaaaatgctaaaaaaattgactacaatctgatcaaagtgttcgatacggttattactgaaggaaatgcaaccagggcggcgaggaaactggatgtcacgcctgcggcgatctctcaggctcttcttcgtttacaaaatctttatggcgaagagttatttatcagaacccgcaaaggattagttccgtccagcaaaggtaaatcgcttcaccaggtatttcgccaggcaattgaatctatagaaagcacactgtgcgataaaacagatgctcaggagagtaatgaactcattgttctgggaggtgatatcactgaaaattactattttccagcattgctggatactgtgttgatgaatcgatatattattaaacactatgcgattaaaaaaacaggggaatactcaccagcctccatgctgacgcatggctatgcggatgtcatcatgggaattctggaaattaagaatgagatgattgaaagttatcttattgataatttatctgattttgtttgtgtttgtggtgaaaaaagtccattggttgggcttgaaaaaatttctttatataatttttatgctgccagacatgctgtctatcattcagatatgttctcttctttcaccgctgatagcattgatttattcaagagtagtacgccttatgcggggcgcagagaaataggttattatagtgattcactatttggagttatcggtgttgttgaaaaaagcgatatggttgcgattttgccaggaaagattgctacttattttagagatgtgcggcgttataatataaaaatactacgtatgcctgatgaaataatttttcgtatgttacccgtttatgcttatctggctacaaacagcacccattataaaaatgccaaaaaactgatatcaacatttcagtcgacctttctttttagccaggaaaagcagcctgacgctttggttgaaggaagcacatccttatgcgatttgtcggtttaatatcaaattatcgtattaaatgaataaccgttatgaccatggtcagtaaagcgaaaaataatgccatatatttatacgcttctttttttaaagaagaggggaggcagcttttgttttcattgctgataataatgttagcatctactttaatacccgttcgaggcaccgtggaaaaaaactggctcaggccaaagcctttaaggtcgcgccgcagtagatataaaatctgggtcaggttggcgtcgctgataaattgacttctttccccccaaagttcattagtgagttgttttttataaataatctcttgttgtgcatgattcagcatatattccagacactttatgcgcattgcggcaatttttatcatctttcccgtttttatgttttttagctcattggtcttatcattgtaagtgtgcgtgctgttaattaaataaatagtcatgatgttatttaatgggtttaattggggtggcgataataatatgcatattaaatttacggatcaactggcgtgattgtaatagcgtcttttttccagagaaaatcgtatcgtgtcacaaaaatgatgtttttttagaaaaactaaaattttatttttagtcgctctaaaaataaaatgatagtagtgttaatttttatcagtagattgatatgctttgattgatttattgttgacataaaataatttgaattatggcgcaaggcctatgccaaccataaaaaaggtataggctattggtcacaatgcattaatgctacataattgttatgcttttatagtagcgccagggaaataaaatcttcggacgataaagaatagttttagtctgggtgttattttatggatgttttattttaaattattaaaccgatttctcttgttgaggtagggttatttgctaagcaacgggctggcatgttgtagctgctcgttgcctatatcccaattaatcaggagaaacgtatgaataagaaaagttcgtcaatggttaacatgcccgcaccgcgtgagccgattaaccagaaaatcgataccaataacgcactggttttaaaccataacgccatatatgaacaacgattagcggagatcacgcaatctaatacctgtgacaaggccattgtcaccgtaaatccctacgggaccgccccgttgagtctctatctgggggtttggatggatgaagctgccgcgcttgagatcaatgttgttgatagcgaagcgacgacagaggcagtgcgttatcaatatgatgtacatccgggcgctaaccttattcctgtgtgtgggatggtatccgcggtgaataatcagattaccctacgccttgcctcgcaaattgtcgggcaatatacagtaatgacagacgcattaccgcccacggattcggctaacgtgagcctcggcttccctattattagcgtctcctgtcctgcgcagcaggcctcgctgatggaggaaggactttatttctccacttattttgatcggtataatctggcttttgatcataacgggattgtccggtggtatgtaagtcaggaaatcccttcttataattttgtcagaatggataacggccatttcctggcgacgtcacagggaataaaccattgtctgaatatgtatgaatttgacattatgggacgggtttatacggtttatcttctcgacaatgagttccatcactccattcttcccattgagaacaatctggcgattgcgccttcagaatatagcaatggacggccagacggttactcaaccgggaaagatggcgtttctattattaacttatctaccggacttgaagtcgcctattacgatatgctgtatgtgatggattattccagatcgccgcgtccttccggaagcgcgccaggtcaggacgtatcaatggatgactggctgcatatcaaccaaagctatattaatgaacccaacaatttgctgatctgttccggtcgacatcagagcgcgatttttggcgtaaatgtggattccggcgaactgcgctttattatggcgaaccatgaggattggtctgacgaattcaagcaatacttattaacccctgtcgatgatgatggtgtcccgctgtacgatcttacctcgccgggagggattgatgcggcagataagaatttctggacctgggggcagcataacattgttgaaattccaaacgatgagcctggtatcctggagtttatggtctttgataatggtaactatcgttcacgcgaagatgcgaaaagtctgttgccgctcgataacttcagccgggtggtgcagtttaaaataaacctaaacacgatgaccgtaacgcgtccgtatgaatatggtaaaacggaagtcgggaaccggggctatagcagttttgtgagcgctaagcatttattgactaatggtcacctggttattcacttcggcgcgacgacggttgatgagtttgaacataccattaccgcgcaaccaggttccagcgatcttgtcgatccggatgaagggcaacaggcgttaggtcgactggtattacaagaaatcaataaagagacgaaagaggtcttattcgaagcgatggtgacgtcgggctatttcaagaacgaagagacgaatggcacgaattatcgttatgatatttctgcatttcgggtatacaaaatgccgctgtttgcataactaagtatgttatgcggccggttatcgaccgcataacattatggcttatttgctaatatcatccacgcgcatggtgtggtcaggttgaatattgttaacctgcttcatatagttaaccaacgccggtgcggtttgtacccctatatatttgatatttttacctttagtgaaggtaaatccgccaccacctttaccgataaaggagtccagcgcgacggtatagagtttattgtcttctaccggtttgcctttgatatcaaattcaacaatacgctggcccagcggtttggtgctgtcatatttaaactggacggttttagatacgtgcagcataccgtttttcagatcggcagcgtgtgacatgatggatttcaggtctttaccgctgatttccatgctcatgacatcgttggtgaacggatacatactcagcacatcaccataggtgatattgccttttggcaattcggtacggatgccgccagcattatagaaggaagcgtcggcgccaggaacggtagccatcagggcatcggtgattaagttgccggttggcgcggattcaccgtaagaacgggtcagcacttccggagagtgcgcgaccacctcatcggtaattttcttaaccttgttatcccattcgtcaattttggcctgcgtgaccggatctggcttataagtatccgcatacatggtgatcaacttaccattgtagctgtccacttttttggtttccgggttccagtcaagcaccagtttacctaattcgatggtgtacgcatccgtggaaacgacaagggtatcgcccactttaatcggttctggcgtacctttatgcgcatggccggtaatcaggacgttaagtccatagccttccagcgatttcgccatatcaacgtcggttttcagcgcgcgtgcgacatcagcctcgcctgcgctggactgcatacccggcacgccttcgtgggcgagcagcacggtcaggtcaactttcccttttaactcttccagctgttttttcacataaggaatcggatcgcggcagtcaacgccttcacgcacgcctgcggcaatcgcttcatagaatgcggaaacgccgtgcataccgatgacgccgatcttgaatccatctttttccacgatggtatacggttctttaattaatggcgtatctgtgccgctgtaaaaaacattatccaacaataccgggaattgcaatttgctgagttgtttaaccagattctcatggccatggtcaaattcatggttaccgacagagacggcgtcgtaaggcatggtatttaaaatatcaataatagcctcgcctttggtcagcgtactgataaaaggtccggtgaaatagtcgccagcatcaaagaaaaagacatctttctctttcgcttttgcatctttgacaattttcgagatgggcgcaaagccgcctaccggacgtgtcttggatacataggggataatttctggggttacatgggcatgtaaatcgtttgtataataaattgtgatgtcacgcgcatcggctgaaaaggaaatggctgaagacaaaccaatgcacagcgacagtagggatatcgaaaactttttgttcatataaaccatccatttacgctacattaaagaaaaacaatgcctgtagtcgtgtcattcacgactacaaaccggggaaattaagtaatattcatcaagtttattaattattaaaactcgaagccgatcaggtaattcatacggtcgccgtagccgtcataccccaatttattattgaagtaacggtaagagacggaggcggtccatcgcggcataaatttccatgtaaacgttaccgcgccgttcaggccggtcgtcccaccctgttgttcggcgtaggcatcattacgatccatttcaacttcgttccagtttgaaatgacgaacttttcattaaacatatcgaagttataagccgcgacccaaccgagaacataaccgttaaagcctgtcgcctgtccatactttttagaggtataatcgttcgataagttatgaacagcgaaatagggcttaataaagcctgatgggctggttaaacccagataacctaccccgtacatcatgtttaattcatcaccgaatttattctccatcgacatatagagtttcatcattgcggtaaagttagagccttctactaccctataatgtcccagaaattgggtaacatggttacggccttctaccggatggttgagcacgttcatttcataaaatgatgcaaattcgcccctgtcaaacacggcgccgaaatcggctaccgctttccacacttcgccgcgatcgacattgacaaagcctttattccagtcgccatatccgaagctaagtttaccgtatacgcgtttcaactccgctgcctggccattaaagcaagagaaaagaacacatgcggcgagtagactattaatatatttcttatttttcatgctcaactccatgaggtaaaaacacagtgaaatgttgtgtaaagaagcgaattctaaggagtgtctttttatacgtaggtgatagatgtctcaaaaatatcagcgacatataatcgtcaaatattcgtgtcagataatgttgtttattacgtgataactatttgatttatagtttatgtctctgttgtaaaagtcacaccggatagcatgaaattaatgaaacttcgaatgggaataatctctcgcaaagacaacttactgccattaaatgagggtgttaccgttcaaacagcaacatatattgacatcacaatagcggttctgacatatgggccatatttgagatctgcatcactcgttcgcgatttctttttttatagactgcttcaggcgtgttttctttagcacgaaatatatttatggcattaatattataatgagtgtgaataatttctacgataaaacgatgttaatggaagaaatataagacaaatcgaatatatatagtgcaattaatttaggctgtattccgcagccgggtctatcggcaaatatatcgtaatcagaccgtgcgataactcaaaggagttgaaatgaaaagaacagtcgttgccagtatgatagggttggcgctatgcgctggatgcgtattatcaaccgcgcaagcggcaaccgcaaagcgtcctaacttagtcattattctggcggatgatttagggtatggcgatctcgccacctacgggcaccgcatcgttaaaacacctaacatagacaaattggcgcaggagggggtgaagtttaccgactattatgcgccagcgcctctgtgttctccttcccgcgcgggcctgttaaccggtcgtatgccgttccgtaccggaatccgttcctggataccggaaggcaaagatgttgcgctggggcgtaatgaactgactatcgccaatctgctaaaacagcagggctacgatacagcgatgatggggaaattacacctgaatgcgggcggcgatcgcaccgatcagccgcaggcgaaagacatgggctttgactatacgttggttaatccggcgggatttgtcaccgatgctacgctggataacgccaaggagcgcccgcgctatggcgtggtgcatcctacggggtggattcgtaatggccaacatattggccgcgcagataagatgagcggcgagtttgtgagctctgaagtggtgaactggctggataataagaaagacgataatccgttcttcttatatgtcgcctttaccgaagtccatagcccgctggcgtcgccgaaaaaataccttgatatgtattcgcagtacatgaccgactaccagaagcagcatccggatctgttctacggcgactgggcagacaaaccgtggcgcggcaccggcgaatattacgccaatatcagctacatggatgagcaggtcggtaaagtgctggataaaattaaggcgatgggcgaggaagataacaccatcgtcatctttaccagcgacaacggccctgtcacgcgcgaagcgcgtaaggtatacgagctgaacctggccggggaaaccgacggtctgcgcgggcgtaaagacaacctgtgggaaggcggcattcgcgtaccggcaatcatcaaatacggcaagcacattccacaggggatggtaacggacacgccggtatatggtcttgactggttgccgacgctggccaacatgatggactttaaactcccgaccgatcgtacctacgacggtcagtctttagttccgctcctgaaggacaagacgttaaaacgccagaaaccgctgatcttcggtatcgatatgccgttccaggacgatccgacggatgagtgggcgatccgcgacggcgactggaagatgatcatcgatcgccagaataaacctaaatatctctataacctgaaaaccgatcgtttcgagacgctcaatcaaattggtaaacagccgcagattgagaaacagctttacggtaagttcctgaagtataaaaaggatattgataacgattcgctgatgaaagcccgtggcgataagccgacgcctgtcacctggggctaatggaataattataaaaaattaagtatgccacttagggcgatgcccacctgatccggtcactctgtgccggatcaggttcttttatttcagggaaggtaatgatgtttgggaaaagttgtcaggtcatggttaaaccaaccggatcggtgtgtaaccttgactgtaagtactgtttttatctggagaaagaaaagctctatccggatcgaaaaaaccattacaaaatgtcggaagagaccctcgaactcttcatcaggcagcagattgccgcacaggatattgatgaggtcatttttgcgtggcagggcggggaacccacattaatgggcatcccgttttatcgtaaagccgttgaatttcagcagcgctattgtggcggcaaaaccatcgtcaataccttccagaccaacggcatcctgatcaacgatgactgggcgaccttcttccgggagcatgattttctggttggcgtctctattgatggcgatgccgcgttacacgatgaatggcgagtgacgcgctccggaaagccgacgcatgaaaaagtagaaaatgcggtgcgttgtctggcgcagcacgacgtagaatttaataccctcacggtggttaaccgtaccaatatgcatcatcctgttcaggtctatcgctacctgaaaagcattggtagccgctatatgcaatttatccctttagttgaacgctgcggggaaaatggactggcgcagccgcaggataaacatatcgcgatgacgccgtggtcggtcgatagcctgcaatttggtcagtttctgaatgcggtatttgatatctggatccgtgaggatatcggcgatatcggcattcagctatttgaacagacgctggcggcctggtgcggcctgccgccgcaggtttgcgtttttgcgcccacctgcggcagcgcgtttgcgatggaaatgaacggcgatgtttataactgcgatcacttcgtatatccgcaatttaaactggggaatatccaccagaagacgctgcgtcaaatgaatcagggcgaacaaaatcgccagttcggcagcgataaacagcgttcaatggcgcaggagtgtcatcgctgtcaatggaagttcgcctgctatggcggctgtccgaaacatcgttttttaccctctgcgtcaggcgcaaccaatcataactatctgtgtgcaggttatcaggcttttttctcgcataccgcgacggcgatgagtgccatgcgaaccctgtatgaaaaaggcatctcacctgcagaaataaagtcaatatttgtttgaaggtagtattcgcagggagtgaatatgttttctcacattaatgtcgatgcttgcaaaacgccaggctgcaaaaatctggggattctggggagcccagactatctaccgcaagggaaaaatgttctctgtcgagcgtgcggttttttgttccccattatctcagccagatcgcttaatctttttcgccaggcggcgaatcaaccctggaaaggtctggtgaagtcctgtccgcattgtggcgggacgtcgctgaaaaaatatggattttccactaaaggtgaacggcgtatgtattgccgccagtgtaataaaacgttcatctcctataccgctgtcaggagcgacgccagacaagagaaccttgccacgttgattggcgaaggagcgtcgctagttgaaatacgcgcggcgctggcgatagacagcacgggttttagccgcgaattacaaaaactgtcccgtcgcgctaatcaagcggaacgcgattttgtgtttcccgcgtttgatatcgctatgagcacgcgggcgtttcgtgtgaaatttaacggcggcgacagcagcttatacgtgctggtgacggcggaagaggagagcggtaaggtcgtcgcgatctcaacgaattactccgcccaaccggtggaagcggattatcaatatcattctgattacgaagaacgacttccgtccggcacgctggcgcatctggtgcagcgaaaagaggcgctgaccatgcgccgcaatgtattatttgatgtggattacggccccgccgttttatataaaaacgatccggggatgttagtaaaacccgtattacctgcttatcgacattttgagttggttcaggcgttgacggatgagcgttccctgaatgtccaacattatctcgatcacgaatgcttcattctgggcggctgtatgatggcgaattttagctatcttcgtcaggggcgctgccatatttcgtttgtgcgtgaaagaggcgttacgccgcccaaacgcgatctccctccgcggttgtttttgagcggcggaattcgcaacaacgtctggcgtacattttccacacgggattatgcgatggcggtatgcaatctcacaggaaataaaaaggtgagtttgttacgccatgcgacgttaaatagcgcgacggcgtttattcgctatgttcacaaccatcccttcctgccgcatcttaaccggatgtctcctggcaatgttgttgccgtactggattacctaaaatttgaatataacgcttcacgtaactgaattgctaaaataaaaagtgtgatgaggtgttgttgcggtattttattcggacggcttaaaaatccagagtattaattttcgtggtccccatgaggggcgatgagattaatacactggagatttatcatgaatacgttaactacaacgtctgttgtccttcctgcgccgcgtccggcgattaatcagggtatcgatatcaataatgaaatggtgcttaaccataccgctatttatgaaaattgccttgcgcaggtcacgcaagagaatacggtagaaaatgcgctcatgttgttagacccttacggcacggcgcctttaagcgcttatgccggggtctggagtctggaaccggctgagatcatagtcacggtccaggatgcggcaaaaacggcgatgccggtagaacatctttacacccttacggcaggcgcaaatctgttgccggttctggggctggtagcggatactgaaaaccgtattgtcttttctcaggcagatacgccgcttgccgtctatacgctcatcacacagccattaccgccggtagattccgcggaggtcgtattaggttttccgattatcaacgtgacgcaacctgctaccgatgcggacaagatggcgccagggttttattttattacgcatttcgatcgctataattacgcattagatcagaatggtctggtgcgctggtacgttactcaggattatccgtcttataattttgttcgaattgataatggccatttcctcactacttcagaagcgaaaaatacctatctggatatgtatgagttcgacatgatggggcgtcttcacacattctataatctcgataatcaatttcaccattctatctggccgtgggatagcaataccattgttgcgccctctgaatatacctcgggtcggcccgacgatttgaaaaccaatgaagacggcgtatcggttgtcgatctgactaccggactggagacggcttactacgatatggcgaaggtgctggatacgacgcgggtttcccgtccttcaggtacggcgccgggagaagacccgacggttaaagactggctgcatataaaccagagctacgtgaatgagacgaatcagttgttaattgcgtccgggcgtcatcagagcgcggtgtttggcgtcgatctgcaaacgcaagcgctacgctttattttgtcaacgcatgaagactgggacgacgcttatcagccttatcttttaaccccggtcgacagtgaaggtgtggcgctttatgactttagcaaacaggaggatatcgacgcggccgaccgtgacttttggacttggggccagcataacgtcgttgaaatcgccaataatacgccgggtatagtggagtttatggtatttgataacggtaactaccgttcgcgtgatgacagcaaaagcctgttaccgccggataactacagccgcattgtccatttcgtggtgaatatgaatgagatgaccgttatgcggccatttgaatacggcaaggagctgggcgcgcgtggctacagtagctgcgttagcgcgaaagcgatccagcagaatggcaatattgtggtgcattttgccgactgcacgtttgatgaaaatggccgcgccatctcttgccagcctggcgagagcgatattatcgatccgcaggcgggcagcgaggcgatggggctgctaattttacaggagattgcgcctacggagaaaaccgtgctttttgaagcgaccatgacgtcaggttactacaaaaacgcggaaacgaacggggaaggctatcgctacgatattaccagtttccgggtgtataaaatggatctgtacgcgtagcggtctatcatcaatgactgactgcactaaaaaagtccggcgtaagtcggacttcatttcgtaaaaaacgagctattcatcatatataatctaattttaacgatgagtcaggcgaggtaagatagtagatccgaagaattcacctgattgagagaataaaaagtgaaacatctgcaccgattttttagcagcgatgcctctgggggcatcattctcatcatcgccgctgcgctggctatgctgatggccaatatgggcgcgaccagtggatggtatcatgattttctggagacgccggttcagctacgggttggggcgcttgagatcaacaaaaacatgctgttgtggatcaacgatgcgctgatggccgtgtttttcctgttgattggcctggaagttaagcgcgaactgatgcaaggctcgttagccagtctgcgccaggccgcttttccggtgattgccgccatcggcgggatgattgtaccggcattgctctatctggcctttaactactccgatccggtcactcgcgagggctgggctattcctgccgcgacggatatcgcctttgcgctgggcgtgttggcgctgttgggcagccgggttccgctggcgctgaaaattttcctgatggcgctggcgatcatcgatgatctcggcgccatcgttattatcgcactgttttataccagcgatctttctatcgtctcgctgggcgtggcggcgttcgcgattgccgtgctggcgctgctgaacctgtgcggcgtcagacggactggggtatatattctggtcggggcagtgctgtggacggcggtactgaagtccggcgttcacgcgacgctggcaggcgttattgtcggtttctttattccgctgaaagaaaaacacggtcgctcgccggccaagcgtctggagcatgttctgcacccgtgggtcgcgtacctgatcctgccgcttttcgcttttgcgaatgccggcgtttctcttcagggcgtcacgattgacggtctgacctccatgctgccgttgggaattattgccggtctgctgattggtaagccgctggggattagcctgttttgctggctggcgctgcgtttcaagctggcgcatctgccgcaggggaccacttatcagcaaatcatggcggtcggcattttgtgtggcattggctttacgatgtccatctttatcgccagcctggcatttggcaatgtcgatccggaacttattaactgggcgaaattgggcattttgattggttcattgctctccgcagtggtggggtatagctggttgcgcgcgcgtttgaacgcgccggcataatcagtacgaaggaaagggggagcgatgtatcgctcccttgcgacattgaacagggagagaaatgagcatgtctcatattaactacaaccatctttattatttctggcatgtctataaagaaggttctgtcgtgggtgccgcagaggcgctttttctgacgccgcaaaccattactggtcaaattaaagccctggaagagcgtttacaggggaagctatttaaacgtaagggacgcggtcttgaacccagcgaactgggcgagctggtttttcgctatgcggacaaaatgtttacgctaagccaggagatgctggatatcgtcaattaccgcaaagaatcaaacctgttgtttgatgtcggcgtcgccgatgctttatccaagcgtctggtcagcagcgttctggatgcggcggtggtggtggacgaacccatacatctgcgttgcttcgagtccacgcacgaaatgttgctcgaacagctcagccagcacaagctggatatgattatctccgactgcccgatagattccacgcagcaggaggggctattctcagtcaaaatcggcgaatgcagcgtcagtttctggtgtacgaatccgcttcctgaaaaagcgttccctgcctgcctggaagagcgacggttgctggtgccgggacggcgctcaatgctggggcgtaagttgttgaactggtttaattcacaggggttgcaggttgagatcctcggtgaatttgatgatgcggccttaatgaaggcgtttggcgcgacgcacgatgcgatttttgtggcgccgagcctttattcgctggatttttatgccgatgagtcggtaatagagattgggcgcgtggagaatgtcatggaagaatatcatgcgatttttgccgagagaatgatccagcatccggcggtgcagcgtatttgcaatgcggactactcggcattgtttaaactacagtagacgtacctaccgtaatacttccggctgcggtattaacccgcagccggaatcattctacaagttcagcaggctacggtactgcccaccttcgcggataaacaccggaattctgttcagtggcgtagcgtaatgcagcgtctgccctcctgaatagctttcaccggtcgcaagatccgtccatgtttccccttctggtagccagacatcacgctcgcgcataccttcatgcatgacgggggcgatcagcaggtcaggaccaaaacaatactggtcggtgattgtccaacttgtttcctgttcggggaattcaaagaacagggggcgcatcactggcgtattgtgcttatgggtttcctccatcagcgctttgatatagggcttgagtttttctcgcaacgccaggcaacctgtcagtacgtcgcatacttcctcaccgtagctccagacctcgttcggcgcacctgtagggcattgagcaatgccatcccggtacggttgcgcgggtaaaatctgcggatcgcggttgccgtgcagacgcatcaccggactaaagacgccccactggaaccagcgaattagcaattcatggaatttcgggtcgtgaatattaccgccatggaaaccgccgatatccgtcgtccaccacggtatccctgctattcccatattgagtccggcggcaaactggttgcgcagcgatctaaacgaggagtgaatatcccctgaccagaccagagcgccgtacttctgactgccggcccaggcgcagcgtagcaggttgataacctggtcttcgccatcggctttcatgccatcaaaaaaggttttggcgtacatgcgtgggtagatattgcccacttccagtaccggcccggcatggtagcgatagttgtcgtagtcgtaaacgctgaactcaggttcggcttcatctaaccagaataacttcacgcctttatcgtaatagttgcgtttggctttgccccagacgtagtcgcgcgcgcccggatgagtcgcatcaaagtaagtggtattgccgaggaaatccatattgatcggcaagccacgttccgtttgtaccagccagccgttttcgcgcatctcccgatagctttcggtacggttatccaccgtcggccagacggagaccatcagctcaattcccagcgatttcagctcggcaatcatggcatcaggatcgggccagtcgcgcgcatcgaacatccagtcaccctgattcggccagtgaaagaagtcgataacgatcactgagataggcagattgcggcgcttatattcgcgggcgacctccagcagctcttcctgcgtacgataacggagtttgcactgccagaagcccatagcgtagtccggcatcatcggcggcgtgccggtagccagcgcgtaagcccggctaatttctgccggggtatcgccagccgtgatccagtagtctaactgttcgctgacctgcgcttcccattcggtaacgttttgggcaaaggttacgcgtccgactgccgggttgttccataaaaatccgtagcccagactggagagcataaacggtactgaggcctgggagttacgttgcgccagctcaagcacgcatcctttgagatccaggttggcctgttgatactgccccatgccataaattttttccccttcggtggcttcgaagcgggctttcagtgaatatttcccaccctgaatagggcggaactcgcgtccctcaaggttgagtgcgctaacgtactggccgtgagatgattcatcctcgccaatttcgccccgcaggcgccagaactcctgcaacaggggtttgtgtggatggcggtaaaaggtaacttgtcctttttgattgacgatagcgataattttgccgttggtcagcgttgcctggtggtgctcataatcaatgtggcactgactttctgcgactggctcagtcaatgcccagtcttcatttctcattaccggcagatgacggccgctgcgtacgcgcaggctgttctcgccccagggttcaatccataaatagcgatcgttttgctgccagaccagacgacgcgggtcttgttgcataaatggcatggtggtgcctcccatattcgagggtgaaggtaaagaacgttatgagttgacggtttccagatcgtggcgaatcttctcttccatcgcttcgtatttgcgaaagaaaagtagtgggatcgctgcgagcgcgaagagtagggcgggtgcccagataaaggcccagataatgccctccagacccgcagcactctgggcatggttggggacatagccaaaactgttcatgatccaggcggcgaaagcggtgccgaggccactacccatcttgatgcagaaggtgctgccgaaggcgataagaatgccggtagccttaataccggtcttccaggcgccgaaatcgacggcgaaccccagcatggcaaacggcattgagcaggcgataccgctgccgatattgccgagtatccaggcggcgatgaggaaagtaatgttgtccgctgccagccacatcatgacgccgccaaacgtggcgaccagcagaccgcctacccatatccaggttttagccaggtatttgctaaagaaggggatagcgatgataaacaggatctgaatcgtcgccaggctgttaatcagcggtaccagatctttacggtcgaggttgtaggtcagataatagacaatggtcgtgttgcgctgctgtagggcaatccagaagatcagattagccagcaccatcaggatccacggccagttacctttcatcgccgcgaaactttttttcatcggcaacttaggttcatgctgtattttatccgtatccatttcacgaatgtttttaaacgcaaagagcgttagcgcgcaggatataatggcaaacgtaattgccgtataaataaaaccagcgtgatcatcaccgttacctaaaaaagcgactaacggcaaggcggtcgcgttcattaataaaaccccaatttgtccaccggtcattcgccaggaatttaaaaccagtctttccttgggagataaggtcatcaggggtaatattgcactgagtggtgtattaagtccggtaaatagaatgctggcaatcatataagatattgctgcatagatggcttttcctgtcatactgatatcaggagaccaaaatgacagtgcgctgaataccgcaaaaggcagcggtaaccataaaaaccagggacgacatttaccgtagcgtgaacgtgttttatcgatgatgatcccccatatgggggcgtctatgccatcgataatacgcgccagcagcaggataacgcctgctacggcaaggctaatgcccgcaacgtctgtgtagaaatataaaatgtacgttgaaccgaagcagtacagcagattacccgccacatccaaagagccgtagctaatacgctgtagtaaagacaatgatgctgacccggaaggctgggtatcctcaatgacagaactcataatgataactccgatattggtacgatacgcccagaaaaacaacctctactttctaagcaagttttgaatattatttttatgtcgtttttgaatttaacctcagattaaaatgagtaagtaaggtgtacatgaaaagtagttaacccgacggcatcaatcaattattaaatcttacatcaggattgcgtttattagtttttgaatgagcgatgtttttatttgctaaggtggtcacagttttttcagtaatgaaataagaaaaggaaaacagtgaaagaaaataactttcaagtattacgtgactaagggagggatagctgaaaaaataggctggttagtaagagcgtgaacgagtgaggtcagcgccagcggttgacgagcaaaacggcagatagcaggcataaaaaaacccgctttacgcgggtttttctacaaagctgataacaagcaggcgattaagccagtttgttgatctgtgcagtcaggttagctttatgacgtgcagctttgtttttgtggatcagacctttagcagcctgacggtccacgatcggttgcatttcgttaaatgctttcagtgcagcagctttgtcgccagcttcgatagctgcgtatactttcttgatgaaagtacgcatcatagagcgacggcttgcgttgtgcttacgagccttttcagactgaacggcgcgcttcttagctgatttgatattagccaaggtccaactcccaaatgtgttctatatggacaattcaaaggccgaggaatatgcccttttagccttcttttgtcaatggatttgtgcaaataagcgccgtttaaattgcagcactcgttgcgtagtgatggcgcaggattctaccagcttgcgtgctgtgaatacagcctttccatgagaaaaattgcattaagcggcgggttttggggcggagtttgccgcatggcgatgaaaagcatcttctttatgtttcatcagggcaatcgccggttaaccttaaccgctgtacaaggtatactcttgcgattttcactgttttgagtcagacatgaagctgatacgcggcatacataatctcagtcaggccccgcatgggtgtgtgctgaccattggtaatttcgacggcgtacatcgggggcatcgcgctctactgcagggtttgcaggaagaaggacgcagacgcggtctgccggtggtggtcatgattttcgaaccgcagccgctggagctgttcgcgacggataaagcgcccgcccgcctgacgcgcctgcgtgaaaaactgcattaccttgcgcagtgcggcgtggactatgtgctgtgcgtgaaattcgatcgccgctttgccgctttgacggcgcaaacgtttatcagcgaactgctggtggagcgacttggcgtgcaatttcttgccgtcggcgatgatttccgctttggtgctagccgcgcgggcgatttcttgttattacagaaggcgggggcggagtatggttttgcggtttccagcacccaaaccttttgtgaaggcggcgtgcgtatcagtagtaccgcagtgagacaggcgctggcggaagataacctggcgcttgccgaaagtctgctgggacatccctttactatttccgggcgtgtcgttcatggcgacgagctgggacgtaccattggcttcccgacggcgaacttaccgctgcgccgtcaggtctccccggtcaaaggggtctatgcggtggaagtcaccgggcttggcgataagccgttacccggcgtagcgaacattggcactcgtccaacggtggctggcgtgcgtcaacaactggaagtgcatctgctggacgttgtaatggacctctacggtcgccatatagatgtaatactgcgtaaaaagatacgtaatgagcagcgatttgcgtcgcttgatgagctaaaagcgcaaatcgcacgcgatgagttaacggcccgcaagttttttgggctagccgggcaggtgtaaccctgacggtgtttatcaaaccgaaatacggaaccgagaatctgatgagtgactataaatcgaccctgaatttgccggaaacagggttcccgatgcgcggcgacctcgccaagcgtgaaccgggaatgctggcgcgttggaccgatgatgatctgtacggcatcattcgtgcggccaaaaaaggcaaaaaaaccttcattctgcatgatggccctccatatgcgaatggcagcattcatattggtcactcagttaacaagattctgaaagacattatcgtgaagtccaaaggactgtcgggatttgactcgccttacgtgccgggctgggactgtcacggtctgcctatcgagctgaaagtcgagcaggagttcgggaagccgggcgagaaattcactgccgctgaattccgcgccaagtgccgcgaatatgctgctacgcaggttgacggccagcgtaaagacttcattcgtctgggcgtgttgggcgactggtcgcatccgtacctgaccatggacttcaaaaccgaagccaacatcatccgcgcgctgggcagaattatcaaaaacggtcatctgcacaaaggcgctaagccggtgcactggtgcgttgactgccgttccgcgctggcggaagcggaagttgaatattacgacaaaacgtcaccgtctatcgacgtggcgttccgcgccgtcgatcaggatgcggtgaaagcgaagtttggtctgccgggcgtgagcggccctgtgtcgctggttatctggaccaccacgccgtggactctgccggctaaccgcgccatctccctggcgccggactttgattatgcgctggtgcagattgacggccaggcggtgattctggcgaaagatctggttgaaagcgtcatgcagcgtattggcgcggctgaatacaccattctcggcaccgttaaaggcgcggagctggaactgctgcgctttacccatccgtttatgggctttgacgtgccggcgatcctcggcgatcacgtcaccctggacgccggtaccggcgcggtacataccgcccctggtcacggcccggatgactacgtgatcggccaaaagtatggcctggaaacggctaacccggttgggccggacggcgcttacctgccaggcacatatccaacgcttgacggtgttaacgtcttcaaggcgaacgatatcgttattgaactgctgaaagaaaaaggcgcgctactgcatgtcgaaaaaatgcagcacagctatccgtgctgttggcgtcacaaaacgccgatcattttccgcgcgaccccgcagtggttcgtcagcatggataaagaagggcttcgtcaacagtccctgaaagagatcaaaggcgttcagtggatcccggactggggtcaggcgcgtattgaatcaatggtcgctaaccgtcctgactggtgtatctcacgtcagcgtacctggggcgtaccgatgtcgctgttcgtgcataaagaaacgcaggagctgctgccgattgagcgtactctggcggcgatggaagaggtggcgaaacgcgtcgaagttgacggtatccaggcgtggtgggatctcgacccgaaagagatcctcggcgaagatgccgatcaatacgagaaagttccggatacgttggacgtttggtttgattccggttccaccagttactccgtggttgatgcacgtccggaattcgccggtcatgcggccgatatgtatctggaaggctctgaccagcatcgcggctggtttatgtcctccctgatgattagcgtggcgatgaaaggcaaagcgccataccgccaggtactgactcacggcttcaccgtcgatggtcaggggcgcaagatgtccaaatccatcggtaacaccgtgtcgccgcaggatgtgatgaataaactgggcgcggatatcctgcgtctgtgggtggcgtctactgactataccggcgaaatggcggtctctgacgaaatcctgaaacgcgctgccgacagctatcgtcgtatccgtaataccgcgcgcttcctgctggcgaacctcaatggcttcaatccggccaccgatatggtcaaaccggaagagatggtggtgctggacaggtgggcggtgggctgcgcgaaaacggcgcagcaagagattctgaaggcatacgaagcttacgacttccatgaagtggtacagcgcctgatgcgcttctgctccgttgaaatggggtcgttctacctcgacatcattaaagaccgccagtacaccgcgaaggccgatagcgtcgcgcgtcgtagctgccagactgcgctgtatcatatcgcagaggcgctggttcgctggatggcgccgatcatgtccttcacggctgatgaaatctggggctacctgccgggcgagcgtgaaaaatatgtcttcaccggcgaatggtacgacgggttgtttggcctggaagagaatgaagaatttaatgacgcattctgggacgatgtccgctatatcaaggaccaggtcaacaaagagctggaaaatcagaaagccaatggcatcaaatcgaacctggaagcaaaagtgacgctgaaatatgctgacgatgctaacggtacgatcaagaagctgaaactgttgggcgaagaggtcagatttatcttcattacttcccagttcgtgatttctgagcaagcggggggtattgatgatgaaaatattcagtacaatgctggtaatacgacagttcaggcagtggtaacgcgtgccgagggtgataagtgtccgcgctgctggcactacactactgatgtcggcaaggtggcggaacatgcagatatctgcggacgctgtgtcagcaacatcgccggtaatggcgaacaacgtaaatttgcctgatgagtaaaccactctgttcaacaggactacgctggctatggctggtagtagtcgtgctgattatcgatttgggcagcaaatacctgatcctccagaatttcgctctgggggatacggtagggctgttcccgtcgcttaatctgcattatgcgcgtaactacggcgcggcttttagcttcctggcggatagcggcggctggcagcgctggttctttgccgggattgcgatagggatctgcgtaattcttttggtgatgatgtatcgctcgaaagcgacgcagaagctgaataacatcgcttatgcgttaatcatcggcggcgcgctgggtaacctgttcgaccgcctgtggcacggctttgttgtcgatatgatcgatttttacgtcggcaactggcatttcgcgacgttcaaccttgccgatagcgcgatctgtatcggcgcggcgctgatagtactggaaggctttttgccgaagccgacagcgaaagaacaggcataagcgtaaataccgggtggcgcttatccggttttgtaggtctgataagcgcagcgccatcaggcaaacgtggtgccggatggcggtgaaaacgccttatccggcctacggttttatcgtcctttgtgcctccgggcaaaacacgtgagcaatttgcatgtctaaatccgtacagagcaacagcgcgatcctcgttcacttcaccctgaaactggatgatggctcaacggcggaatctacccgcaataacggcaagccagccctgttccgtcttggcgatacctcgctttccgaaggtctggagcagcagcttctggggttgaaagaaggggaaaagaaagcgttttcgctggagcctgacgccgcgtttggcgtccccagtccggacttgatccagtatttctcgcgccgtgagtttatggcggcgggcgaaccggaagtcggggcgattatgctttttaccgcaatggatggcagcgaaatgcctggcgtgattcgcgaaatcaacggcgactcgattaccgttgattttaaccatccgctggccgggcataccgttcactttgatattgaagtgctggaaatcgatccggcgctggaggcataaacatgcagatcctgttggccaacccacgcggtttttgcgccggggtagaccgcgctatcagcattgttgaaaatgcgctcgctatttacggcgcgccaatttacgttcggcacgaagtcgtgcataaccgctatgtagtggacagcctgcgccagcgcggggcgatctttatagagcaaattagcgaagtgccggatggcgccattctgatcttctccgctcatggggtttcacaggcggtgcgtaacgaggcgaaaagccgcgatcttaccgtttttgacgccacctgcccgctggtgacgaaagtccatatggaagtggcgcgcgccagccgtcgcggtgaagaatctattctcatcggccacgccgggcacccggaagtggaaggcaccatgggtcagtacagcaacccggaaggggggatgtacctggtggagtcgccagaggacgtctggacgctgaatgtcaaaaatgaaggcaagctctccttcatgacgcaaaccacgctttccgtggacgatacgtccgatgtgattgatgcgctgcgtaaacgctttccgaaaatcgtcggcccgcgcaaagacgatatttgctatgccactactaatcgtcaggaagcggtgcgggcgctggcggagcaggctgacgtggtgctggtggttggctcgaaaaactcttctaactctaaccgattggcggaactggcccaacggatgggaagaaccgcgtttcttatcgacgatgcggcggatatccaggaggcgtgggtgaaagaagccgcctgcgtcggcgtcactgctggcgcttccgcgccggatattctggtgcagaatgttattgcgcgtctgcgcgagtttggcggcggcgaagccgtcacgcttgaggggcgcgaagaaaatattgttttcgaagtgccgaaagagctgcgtgtggatgttcgtgaggtcgaataagatttcataattcagaaatctgcctgatgacgctacgttgaccagatcttaagaatttcttttgatattcaatgtgcgacaggaaaaataaggcgtagtcgtcatccgttgctaatgccccacctttttgctattcatctgaaaaaccagcacaatcgttgctggttttttggttgtaatgcctacagggataagggaaatgggcaaaataaaatatggattgccaacgttactcgccatcggcttttggatggacgcaacaagcgccacggtgctggagctacctgcctgggagcgaaactataccgggactatcgcggggaaaccggtaaacgttaatatcacgcgatttggtaactctcttaatgggtattactgctatgaaccttgcaatcagcacaaggcagtgattgttctacgcggctcactccaggataaagaggtgcatcttgaagaacgcgtaaaggcgctttcgggttactggaatgcggaaatctccagcagtgagattaaaggcgaatggacgtccgcagataaaaaacgacattttcctgttgcccttatctattacaaacctaaaaactcccctgatattgtgctggtcacgaacacgaatgatgcagggggttacgacccttccaaagagattgattgcggcaatacgccggccatttcggcgataaaattataccgtgatggtaaactcatacagaccttagataccgcctcggtgggcacttgtagcccgtttatgcctcaatggggggatgtcaattttgatggctacccggatctatcgattgtaacagagttacttgctgggccggatgctccagtacaaacatggctctatgaccccgccaaacagcgttatgttgatgcgccagcgtcttatcaggaaatcacttcaccagagatcgatgctgaacataaacagattgtcagctattggcgcggcggttgctgcagccatggcgtcaatgtgtatcgctggaaaggaaaaacgattgaactgatcgatcgcggtgaaagctactttcagcctgtgataagtaaaggcaaaatgtataactgctacatgacaccttcctacgctgatgggcgtattatttatccgctagtacgtaaaaatggtcatttgacgccgcctcttagccttgatgggacgtgtcaatcttttttggctaaccggtaatgttcgtaccgtgattcaggcagaaaaacccggcgctgagcccgaatcgcttgagattcagtggcaggaaaacaaagcatcgccagggcgtttttgcccattagttccgtttgtcgaaggtgataagctaagtccgcgtctggtgacggatgacgatgtgcctgatacctgtatcagtcgcgctgagtatgaagatataaaacaataggtcaggagagctttaatgacagcatccctacacattattcttgataccgatccgggcattgatgacgcggctgcgattgccgctgcgctgttcgccccccagcttgatctgcaactaataaccaccgtcgcaggcaatgtttccgttgaaaaaacgacccgtaatgcgttgcagcttctgcatttctgggacgccgatgtgccacttgcgcaaggggccgcgacgccgctgctgcgtccgctacgtgatgcggcatacgtccacggcgaatccggtatggaaggctatgattttgtcgaccatcagcgccaaccgttggcgaagcctgcgtttatcgctatccgggatgtgctgatgaacgccccggagcccatgacattagtggcgattgggccattgaccaatattgcgttgctactgatgcactatccggagtgtgcgtgtaacattcgccgtctggtgttgatgggcggttccgcagggcgcggcaattttacgcctaatgctgaatttaacattgctgtcgatccggaggccgcggcgctggtgttccgcagcggtctggagattgtgatgtgtgggctggacgttacaaatcaggcaatgctctcgccagattttctgaataaactgcccgcgctgaatcgcaccggtaagatgttgcacagcctgttcaaccattatcgcagcggtagtatgcgcactggcgtccggatgcacgatctctgcgctatcgcctggctggtgcgtccggagctttttaccctgcaatcctgttttgtggccgtagaaacgcagggggaatataccgcaggcacgacggtcgttgatattgaagggcgtctggggcagcccgccaacgcgcaggtggcgctggcgctggatgtggacggttttcgtcagtgggtggctgaggtgtttgcctatgcgccgtaattacatgttggcgccataatctcatactttgccgcgatagagtctctccggcctgcccactttcccgtagctgatctccgcttcgagaaagttatttttcacgccttgttccagatagcgtcgggcagtggttttactgctgcccagaatttgcgccagagtgtctgctgtatgtactgcctgcgggtcggcgaatatttgtcgtacccggttgaaggtgttttcatcaattccccgcagtccgctattcggttctgcggtttgttctttggcctggatattaaataaggcatcaacgtgcgtctggtttgcctgctcactggaacgtaacgaactgcggtaacgggtgaaccgctccagggtatgctgcaggcgctgataatgtaccggcttaatcaggtaatcgaatacgcccatgcgtaaggcatcgctgatggtatccatatgattgtcggcggtaatgaaaataattcgccccgtgtagttggtgctgatggtatgacgaattaaatcgatccctttgccatcgggtaaaaaattatccaatagaattaactgtggttgatagaggcgtatttgcttcttcgcactttccagtttgtctgcgatgccgacgattgaaaactggggaaaaatcttgatggtgtccaccaggatttccgctagcatcggttcgtcttcaacgatgagtgtcgtaatgctatccatgttattcttctctggtaaaagggatatagagggtaaaaatggtgccaaaaggattattgttatcgacgataatgtcgccattggcctgcttgacgtagctgtgcaccaaccataatccaattccgtgatcgccgttattgtgggtggtcactccacgctcgaaaatatgctggcggatattttcgtcaataccacatccctgatcggcaacttcaataatgacttcattaccttcgctgttgatcaggcactcaatctgtcgcgagccttcgcgattgagcagggtggcgttataggcgttgtccaataaattgccaacaatcgaaatccattcattatgcgagagcgatgacggcaggtgttcaacaaagcttgaaggatcgaaaatcagctccagtcccagctcttttgcccgataatatttaccgattaatagccccgcaaggtggtggtcgcggaaattatgggaaataaaatcgagtactttctggtggctttccgactgctgctgaatcagcgccagcgcattatcgtagcgcttcaggaacagcagtccggcaatggtggaaataaggttgcgatgctcatgctgcacggcgcgcaggttatcggcgtattgccgcacctgacttaactgcaggctgagtgtattgatatcgtctttgttgcgaaagctaataacccagccctgaggctggttgtcaataatgaccgccatgcgactggcgatgactttcatttggttaaaggtgacgatctcatcttttttgtttttttgcggcgcatcgtaaaagaaggcctccggcaacacgacatggtggattgcatagccaatgagttcagactccggttggctcagattcagtaagcggcgagccgtttggttaatggcggtaatacggtgatgggagtcaatggcgatcaacccttcaaataccgactcaaacaacacgctttgctgaattaatagttgtgaaagctgctgtggctccatgttaagcatctgctttttaatatgcagcgagaagcggcgggcacagtacaacagcaccagcagcagtaacgccatcgggaacagcaacgagctgatttgtaagttaagccagctctccagctgttccagagtatagccgacggaaacaataccgatgactttaccggtactgtcctgaatcggggatttaccacgcaaggaagagcctaatgaacctttgcgcaccgatacgtagcttttagcattatacagcgcgtcgtcgctatcgccgccctccatatatttgccgatctcatccgggttgacgtgatacagtcgctgacctttttcgttgccaacggtaatgtaagtcgcatccgaaaacgagcgcattgggtcaatcaacgctttgatgcgtgacaaatcatgcgcctctacggcttcaactaattctggcatagcggatatttgcattgcctgaataagcgcacgttggcccacctgataatgcaggcgttctttcgtgatatcggtcagataccaggtgattgccagcatcacgatggtggatgtaaacaggagcagtagaaatatccggttttgaaacgagtgtctggcaaaccagcgtgtaatttcccgtataaacatattggtatttaaatatttaattacggtattttcttgcattcggcatcaccggaacctgaaccagttcatacttacttttctttcagaaaaaatttggatgaaaatgggatacgacatgcgtatcccatccactattacatcgccagcacgtatttcagcatcacgcccgcggcaatggccgagccaattacccccgccacgttcgggcccatcgcgtgcatcagcaggaagttctgcgggtctgattccagccccactttgttcgatacgcgggccgccatcggcaccgccgacacccccgccgaaccgataagcgggttgattttgttcttactgcacaggttcagcagcttcgccatcagcaccccggccgccgtcccgataccgaacgcaatcacacccagcagcagaatgcccagcgtctgcggctgcaggaacttatccgccaccagcttcgcgcccaccgacagcccgaggaagatggtgacgatattaatcagcccgttctgtaccgtgtcgctcagacgctccaccacgccgctttcacgcatcagattgccaaagcagaacatccccagcagcggcgcggcgtccggcagcagcagcgccaccagtagtaacagcactaccgggaagaggattttttcccgcttactcaccgtgcgcagctgcaccatgcggattttccgctccgtctccgtggtcagcgctttcataatcggcggctggattaacggcaccagcgccatgtacgagtacgccgccaccgcgatggcccccagcagctccggcgccagcttgcccgacagataaatcgccgtcgggccgtccgcgccgccgatgatgccgatggccgccgcctgcggcagggtgaagctgataaggccgaagtagttcagcgtcagcgcccccagtacggtggcgaagataccgaactgcgccgccgcccccagcagcagggtgcgcgggttggccagcagcgggccgaagtcggtcatcgcgccgacgcccatgaagatgaccagcggcgcgacgccggagccaatcgccactttatagaacagcgccagcacccccggcgtgtagcccatgtccaccgccaggttctccatctggctctgcaccgacggcagcgccagcgctaatgcctctttaatggcgtgcacgtccggcgcgcagttaagcttcgcggcaatcaccgccagctgcccggcgtcgtgatgcgccagcaggctctccagcgcggtcagcgccatacccgcttccgggatgttggagagcaggccgccgaagccaatcggcagcagcagtaacggttcgaactttttcgcaatcgccagccacagcagcagcaggctgaccagcagcatgatggcctggcctgcgccaaggtgcatcagccccatgccctgaagcagggcgttcagactttccatttcagttctccgttacgccagcgtcatcagggtgtcgcccacggaaaccgcgtccccggacttcaccgcgataccgcgtaccgtcccggcctgcgcggcgcggatttcggtttccatcttcatggcttccagaatcagcagcacatcgccttcggccactgtctggccttcggtggcaatcaccttccagatgttgcccgccagcggcgcggtgaccggggtgccggcgcctgccggggcggtggcaggagcagaagaggcagcaggtgcagccgcagtgagctggctgatatcgccgccgtcgctgaccttcaccacaaaggctttgccttccacttccacggtgtagataccggaagcggcaggcttctctgcttttgtcaccggctgcgcggcttccgcctgcggcagtggctcaaacgccgccgggttgtggcggttttcgaggaatttgaggccgatttgcgggaacagcgccacggtgagcacgtcgtcgatggcgtttcccgcaagctgaatccccttctcctgcgcctggcgcctgacgtccgcttccagttcagccagttccggcttcagcaggtctgccgggcggcaggtcaccggagcgcctccttccagcacgcgggcctgtaacgcggcgttcaccggcaccggggtgtggccgtattcgcctttcagaatgcccgccgtttctttggcaatggtcttgtagcgttcgcccgtcagcacgttgagcaccgcctgggtgccgacaatctgtgaggtgggggtcaccagcggaataaagccgaggtcctcgcgcacgcgggggatttccgccagcacctggtcgagtttgtccgccgcgttctgctgcttcagctggctttcgaggttagtgagcattccgcccggcacctgcgccaccaggatgcggctgtcgtagcctttcagctggccttcaaaggcgtggtactttttgcgcacctcgcggaagtacgcggcgatattttccagcttcaggatatccagcccggtgtcatgctcagtacctgccaacgtcgccaccagcgcttcggtggccgggtggccgtaggtggcgctcatggacgaaatcgccgtgtccacgccgtcaacacccgcctcgatagccttcagcagggccatctccgccatcccggtggtggcgtgacagtgcaggtgcagacgtacgtcgtagcgttttttgatttcgctcaccagctcaaaagcggccatcggggtgagaatgccggacatatccttgatggcaatcgagtcaacgccggtttccagcagttgctctgttaaatccagccaggtctgcagggtgtgcgccggactggtggtgtaggagagcgtgccctgggcgtgcgccccgtggctacgtaccgcctgcagggcggctttcatattgcgcgggtcgttcatggcatcgaagacgcggaacacgtccatgccgtttttgacggcgcgttcgacgaagcgttccaccacgtcatcggcgtaatggcgataaccgagcaggttctggccgcgcagcagcatctgcagtggggttttgggcatggcttttttcagttcgcgcaggcgcagccacgggtcttcgccgagaaagcggatacaggcgtcaaaggtggcgccgccccagcactccagcgacccgtagcccacgtcatcgagcgcggcggcaatcggcagcatgtcatcaaggcgcaggcgggtggcgaacagagactggtgggcgtcacgcaggacgacgtcggtaatggcaatggtcatggatccctccgggaaattaaacgtggtggcggtgatggtgaatggcggcggcaatcaccggctttaagcgggtgaagtcgtccacgacgggaacggcacgcggtgcgggcgcggcgacgggttccgggaagaagcgagtaatcacggcggacatgccgcggatggcaaagatgagcaggaacagaaagctcagtacgaaccccatccctaaaaacatcagggtgaaaccttcacccagtagtacagcttcattcatgaatcattttccataatgagaggcacgacggtggccttgacgacaaccttcctggtgaatccggctaaggagtagagtggatttcccttggccacctctggctttggcctctacttttctccaggtcgtttgctgccaagacaccgccgtgcgtttttttacaccatcatgctgaacacgatgctagcgataaccagcacaataccgccgcccagacgagaggaaatttgtgcatatgaaatgaggttcatacggttacaggcggagagcacttccagatcgccggagccgccgcggttggccatacaaagacccgcagtaatggatgattcaatcgggtagaagccaatcaaccagcccccgatagctgcgccaacgactgcgccgaccacaatgattgcggcgataactacgttcgcgaacgtcagggcatcgataatctcttgcagatcggtgtagcaaacacccacaccgaccatcagcacccacagcagttgtttggagaagaagtcagaaagacgtttcgccccggctttaatctccggtgagcaaagacctgatgcgttcagcgcagcaacaatcagaaccatccaggcgaagtagtgaatagagacgccgccgatgcttggcagaattttcttggcaacaacataggccagcaggaagcaggtggtggataacaccatgccaaccgccgtttcacgatgggtaatctgaccggccttttcatcatcttcggttttgaaggaagccttacgaaccaactcaccttcaccgctaagccaggtgtattttttgcctatcatatcgaggagggcggcgaaaataatggcgaagatattcgcaatggtcagaatagcaatagccgttgagtaatactcttcgcgagaacgtccggtaaccgagtgataaatttcagacagaggcacggcgcccgcgccgttaccaccgcccataatcggcagaacgtacagcatcatgatacggtcgaccgggataccgaagcacagaccaatgacgataccgaaaagggacgcgccgacaatcccggcgaggatggttgggatatagcccagcagtgattttaatagcagcttacggtttaccgacaggatcgcgcctgtgatcaacactgcgataaacaggttaaggaagttgcttttatccattacgttgctgatcgcatcaatttctttctgcgtaaatatgccagcatagacaaaataagctgcaaccagaaatatcataaccggtgcgccgccaatatatttattgaagatcggtaaacgtttgccgatttcaccaaaaatggcccccatcacaaacataagggcaaaaccaccgactaagtcagtcggtatagcattataaaaatgagaaagtaataaagtaattaatgcaaaggcataaagcggtagcggcataccaaagattttgaatctgagtaaatcgctagccccctttttctccgtcgccgaagcttgggtcatgttggtcataaacattttcctgtgtattgatgggtaacaagacccgcgcatactaataaattcaatgaaccatgagatgtgactatcttcactgaatggttgtgtttttaattaatttaattatttttattaactctggttaattaaggaaataaaaaccataaagcttataaaagcaagggggaaagtgtgatgtctattccagacgagtaatacaaacgctggcgaaatatgcgacgttatttgctgacggatgcagaatagagtgaatctaatatttaaacgcatttatttgcaaaaggatgtattgcgtcgcgagtcggtcgccatgtttctggagggcgtgggactagccctggaagacgattgtgaaatcgcggtatgcgcatattggcagggtgagatagtcgggtgcggttctctggccgggaacgtactgaaatgcatcgccgtttccccggttttacaaggggaagggctcagcctcaaactgctgaccgagctgcttacattggcctacgagttaaaccgcagcgagcttttcctgttcactaagccgcaaaatcggttgctgttttctggcgcggggttttggcccattgcgcaggcaggtgagctggcggtgttaatggagaacagcagtgaacggttagcgcgcttttgtcgccaactggcgctttatcgtcaaccgggaaaaacgatcggcgccatcgtcatgaacgccaatccgtttacattgggccaccgttatctggtggagcaagcggctgcggcctgtgactggttgcatctgtttgtagtcaaagaagatgcttcatttttttcctataccgaccgttgggcgctgatcgaacaaggaatcgggggcattgacaacgtcacgttgcattccggctccgcttatatgatctcgcgtgcgacgtttcccggctatttcctcaaagaaaaaggggttgtggacgactgccattgccagatcgatctgcaactcttccgtgaacatctggctccagcgctggggattacccatcgttttgtcggcagtgaaccgttttgtcctctgacctgtgcctataaccagcgaatgcacgacattttacacgatccgaagcgcagcggcccggttattgaggtcgtcgagctggcgcgggtggagaaaaacggcgcggctatttccgcctctcgcgtcagaaaactgtatagcgaacgtaattggccggcaataagcgcgctggtgcctgctggcaccctggcatatctgcagcggcatgccgccagacacactgaaaccatatgacgtaacaccgttaacaaggaacataactaatgaaaatcattaaagatgccctggcaggcacgctggaatccagcgatgtgatgatcaggattggtccatccagcgagccaggaattcggctggagctagagagtctggtgaagcagcagtttggcgcggcgattgagcaggtggttcgggaaacgctggcgaagctgggcgttgaacgcgcgctggttagcgtcgatgacaaaggcgcgctggagtgtattttacgcgcccgagtgcaggcggcggcgttacgcgctgcagaacaaacggaaattcaatggagtgcgttatgagacctcgtcgcagtatgttgtttatccccggcgcaaatgcggccatgttgagcacctcgtttgtctatggtgcggacgcggtgatgttcgacttagaagacgccgtagcgttacttgagaaagataccgcccgtcttttggttcatcacgcgcttcaacatccgttctatcaggatgttgaaaaagtggtgcgcattaatccactgaacacgccgtttggtctggccgatcttgaggccgtcgtgcgtggtggcgcggatatcgtgcgtctgccgaaaaccgacagcaaaaacgatgtgctggagctggaagcgcaggttgaacggatcgaacgtgaatgtggacgtgaagtcggcagtaccaggctgatggcggcgatcgaatcagcgaaaggcgtggtcaatgccgtcgacatcgccacctccagcccgcgcatggtggcaattgcgctggcggcatttgattacgtgatggatatgggcaccagccggggcgatggcaccgagctgttctacgcccgctgcgcagtgctgcatgcggcgcgcgttgcgggtattgccgcctatgatgtcgtttggtcggatatcaataatgaagaaggcttcctgaaggaagtgcagttggcgaaagggcttggttttaacggtaagtccttagtgaacccacgtcagattgagctgttacatcaggcttattctccgacacgtaaagaagttgagcatgcgtatgaggtgattgccgccgctgaagaggctgagtctcgcggtctgggcgtcgtttcactcaacggcaaaatgattgacggcccgattatcgaccacgcgcgcaaagtggtggcgctgtcggcttccggtattcgtgattaaggaaggaaccatgaaagagactgtaaccatgctcaaccagcaatatgtcgtaccggaaggattacagccctaccagggggtaacagcgaacagcccgtggcttgccagtgaaacggaaaagcgtcggcgtaaaatttgtgactcgcttgaagaggctattcgtcgttccgggcttaaaaatggcatgacgatatccttccaccatgcgtttcgtggtggcgacaaagttgtcaatatggtgatggcgaagctggcggaaatgggattccgcgatctgacgcttgcctccagctcattaattgatgcccactggccgcttatcgaacacattaaaaatggcgtggtgcggcagatttacacctccgggctgcgcggcaagttaggggaagagatctccgctggcctgatggaaaacccggtacagatccactctcacggcggccgcgtaaaactgattcagagcggtgagctgaatattgatgtcgctttcctcggcgtgccgtgctgcgatgaatttggtaatgcgaacggctttagcggcaagtcacgctgcggctctttgggatatgcgcaggttgatgcgcagtatgctaaatgtgtggtgctcctgactgaagagtgggtcgaatttcccaattatccggccagtatcgcgcaggatcaggttgatttgatcgtacaggtggacgaagtaggggatccggaaaagatcaccgcgggcgcgattcgtctgtccagcaacccgcgtgaactgttgatcgcccggcaggcggctaatgtgatcgaacactcaggttatttttgtgacggtttctcgctgcaaaccggcaccggtggcgcatctctggcggtcacccgtttcctggaagacaaaatgcgtcgccacaacattacggcgagttttggcctgggcgggatcaccggcaccatggtggatctgcatgagaaagggttgatcaaagcgctgctggatacgcaatcattcgatggcgatgcagcccgttcgctggcgcagaatccacatcatattgaaatctcaaccaatcaatacgcgaaccccgcctctaaaggcgcggcatgcgaacgcctgaatgtggtgatgctgagcgcgctggaaattgacgtgaatttcaacgttaacgtgatgaccggttcaaacggcgtactgcgtggcgcatcgggcggccatagcgatacggcagcaggggccgatctcaccattattaccgcaccgctggtccgtggccgaatcccatgtgtggtggaaaaagtgctgactaccgtcacgcctggggcaagtgttgatgtgctggttaccgaccatggtattgcagtgaaccctgcgcgtcaggatctgcttgataacctgcgtgctgcgggcgtggcgctgatgaccatcgaacaactgcaacagcgcgctgagcaactgaccggtaaaccgcagccgattgagtttaccgatcgggtggtggctgtggtgcgttatcgcgacggttcagtgattgacgtgattcgccaggttaaaggctgatgaagggcacagacctgctgtaccagggccaggcagttacgctggaggagatgctacaagcgcgcgataaacgtgccgccaggcagcgtcaggcgttgaactgctatcggctaccgttgatttccctcacgctggttgcaccgggcgccgttaaaaactcagcggtctggcggcgtgtcgccgattacgcaattgccgaaatactggcgctttgcgaacagaaggagtgggtcaacgtctgggaaatgcaggtaaatgaacgcagcggcccggaatggatggcagcggtctgtgcgccggcaatggcgttgaaacagcacatgtcgacactagagatgagccatccgttagggcggctttgggacatcgacattattgatagcgacggtaagtcgctatcacgccgtgaactcgggcatcctgcccggccatgtttgatatgccagcaggatgctcatctctgtgcccggggcaagcatcacacccttgaccttttgttggatgaaattgcacgaaggattgaatgctatgaacgtgagcgttgtgactgaacggcgtacgccagcgtactcatcgctggcggctggcgaacttaatgggttggttgcaagagcgctgctgacggaagccaggctgacaccaaaacccggtctggtcgatattcgtaattcgggagcgcatagggatatggatctggcggcatttgaacgtagcactaccgccattgctccgtggatggaaaagttttttatcatgggcaacaacacggcggcgctggcggcagaaaatgtcctggtgatgctgcgtccgctggggatggcctgtgagaacgatatgctacaggcgaccaatggtgtgaatacccatcgcggggcgattttcgcttttggcctgctgagcgcagcgattggccgacttctcgcgcggggagaaccgttggagcaaaatcgtatctgcgaccaggttgctcgcctgagtcggaatattgttgcccacgagctctcagcaaaaaaagcgggaaaactgacaaagagtgaaacccatttccagtgctatggcctgtcgggcgcgcggggagaagcggaaagcggttttcgaaccgtcagaacgcaggctttgccggtgtttaaccgggtcgtgcaggagcatgacgatacccatcttgccctactgcaaacattgttgcatctgatggcgtggaatgatgataccaatctggtgtcgcggggaggcctggaagggctttactacgtgcagcagcaggcacaaaaattgttgtggcaagggggcgtattggttgaggggggcattgaagcgatgcagtccctcgatgatgaactcatcctgcgtaacttaagccctggcggtagcgcggatttactggcagtgacctggtttttaagtcattttcctgccggttccctctatcctgagtaagtttctcttctttcattctctccagcaatgattcatcctgcgggatgaatcatgtcttttactgatatcgctccctgtttatcattaatttctaattatcggcgattttagatggcggcctccgggcgcgctggttactctgaaaacggtttacgcaatttttacaaaagagaatagctatgcatgaagcacaaatccgcgtcgccattgccggcgccggtggccgcatgggacggcagttaatccaggccgccatggcgatggaaggtgttcagctgggtgccgcgctggagcgcgaaggctcttccttgctgggcagcgatgctggcgaactggcaggggggggaaagtccggcgtgatcgttcaaagcagccttgaggcggtaaaagatgattttgacgttttcatcgattttacccgtccggaaggcacgttgacgcatctggcgttttgccgccagcatggtaaagggatggtgattggtactaccggctttgacgacgccggtaaacaagccattcgcgaggcgtcacaagagattgcgatcgttttcgccgcaaactttagcgtcggcgttaacgtcatgctcaagctgctggagaaagccgcgaaggtaatgggcgactatagcgatattgaaattattgaagcgcaccaccgccataaagtggatgcaccgtcgggtacggcgctggcaatgggcgaggcaatcgccggggcgctggataaaaatctgaaggactgcgcggtctactcgcgtgaaggttataccggcgagcgcgtaccgggcacgattggctttgcgaccgttcgggcgggcgacatcgtcggcgaacataccgcgatgtttgccgatattggcgagcgcgtagagattacgcataaagcttccagccgcatgacgtttgcaaatggcgcgttgcgatcggcgttatggctaaaaacgaagaaaaatgggctatttgacatgcgggatgtgctggggctggatgtattatagcgactaaataccttcgtgatgtggttgtggtaatcaagattaattgattacaaagggcaatatattattgcccttttgtttttgccccccggttattcggtcagataaataacgcctttcaccattcatgtttcgacagtttcttctcccacgacatgttctgccgcagtggcttaccgtatgcaaaaggcacctcgaccagactgataagactgatatccattggggggttagtgctgttccacgggatcgttttatctattttgcttcaataagttagcttttttatgctgtagtgaggctgtttgtggtccaatcgtatgcgcctgtcttaaagaaaaagaagttagatattaatatctaaattggagttatcattatattgtcttaacttgctgttttttgtgattttatgatacgtttgatttgattttttctttttataacaagttgatttttaagttatttttgttgttaatttgcttaattttgaattattattaatttaataacattaatggctattaaatggatttttatcgttgttttttgttgttttaatgtgaaatttgaccatttggtccactttttatcatgacagccagttttttgcgaactcaaggaagcgcaagcgttttctatcgtcacttagttgatctttttgcctcttaaacagaataacttacttataatgtgcaaaataacataaaaaatacccgctttaagttgacttttatccggcttaacttcagaatgccgccgtttgccagaaatccacgggtaagcaaatttgcattgcttcatactgactgaatgaattaatatgcaaataaagtgagtgaatattctctggagggtgttttgattaagtcagcgctattggttctggaagacggaacccagtttcacggtcgggccataggggcaacaggttcggcggttggggaagtcgttttcaatacttcaatgaccggttatcaagaaatcctcactgatccttcctattcccgccaaatcgtcactcttacttatccccatattggtaatgtcggcaccaatgaagccgatgaagaatcttctcaggttcatgcgcaaggtttagtgattcgcgatctgccgttgattgccagcaactttcgtaacacagaagacctctcttcttacctcaaacgccataacatcgtggcgattgctgatatcgatacccgcaagctgacccgactgctgcgtgagaaaggcgcacagaacggctgcatcattgcaggcgatagcccggatgcgaagctggcgctggaaaaagcgaaagcatttcctggacttaacggtatggatctggcgaaagaagtgaccacggcggaaacttaccgctggacgcagggtagctggacgctgaaagacggtttaccggaagcgaaatctgaggatgacctgccgttccatgtggtggcctatgatttcggcgcgaagcgcaacatcctgcgtatgctggtggatcgcggctgccgcctgacggtggtgccagcgcaaacctctgctgaagaggtgctgaaaatgaatccggacggcatcttcctgtcaaacggccctggcgacccggctccgtgcgactacgcgattactgctattcagaaattcctcgaaaccgacattccgctatttggcatctgcctcggtcatcagctactggcgctggcgagcggtgcgaagaccgttaagatgaagttcggccatcacggcggcaaccatccggtaaaagatatggacagaaacgtggtaatgatcaccgcgcagaaccacggctttgcggtggatgaagactcgctgcccgccaacctgcgcgtgacccacaagtcgctgttcgacggcaccctgcagggtattcatcgtaccgacaaaccggcgttcagcttccagggccacccggaggcgagccccggcccgcacgatgcggcgccgctgttcgaccactttatcgagcttattgagcaataccgtcagtccgcgaaataatcaggagtaataagagccatgccaaaacgtacagatataaaaagtatcctgattctgggcgcgggcccgattgttatcggtcaggcgtgtgagtttgactactccggcgctcaggcgtgtaaagccctgcgcgaagaaggctatcgcgtcattctggtgaactccaacccggccaccatcatgaccgacccggaaatggccgatgccacctacatcgagccgattcactgggaagtggtgcgcaaaatcattgaaaaagagcgtccggatgcggtgctgccaaccatgggcggccagacggcgctgaactgcgcgctggagctggagcgtcagggcgtacttgaagagttcggcgtcaccatgattggcgccaccgccgacgccattgataaagccgaagaccgtcgtcgcttcgatatcgcgatgaagaaaattggtctcgacaccgcgcgttccggtatcgcgcacaccatggaagaagcgctggcggttgccgctgacgtgggcttcccgtgcatcatccgtccgtcctttaccatgggcggcaccggcggcggtatcgcttacaaccgtgaagagttcgaagaaatctgcgaacgcggtctggacctctcgccaaccaacgagctgctgattgatgaatcgctgatcggctggaaagagtacgagatggaagtggtgcgtgataaaaacgacaactgcatcatcgtctgctctatcgaaaacttcgatgcgatgggcatccataccggcgactccatcaccgtggccccggcacagacgctgaccgacaaagaataccaaatcatgcgtaacgcctcgatggcggtactgcgtgaaatcggcgtcgaaactggtggttctaacgtccagttcgccgtgaacccgaaaaacggccgtctgatcgttatcgaaatgaacccgcgcgtctcccgctcctcggcgctggcgtcgaaagccaccggtttcccgattgccaaagtggcggccaaactggcggtgggttataccctcgacgagctgatgaacgacatcaccggtggccgtacgccggcgtcgtttgagccgtctattgactacgttgtcaccaaaattccgcgctttaacttcgagaaattcgccggtgccaatgaccgtctgaccactcagatgaaatcggtcggggaagtgatggcgattggtcgcacgcagcaggaatccctgcagaaagcgctgcgcggcctggaagtgggcgccaccggtttcgacccgaaagtgagcctcgacgacccggaagcgctgaccaaaatccgccgcgagctgaaagacgcgggcgcagatcgtatctggtacatcgccgatgctttccgtgcgggcttgtctgtggatggcgtctttaacctgaccaacattgaccgctggttcttggtacagattgaagaactggtgcgtctggaagagaaagtggctgaagtcgggattactggcctcaacgccgacttcctgcgccagctgaaacgcaaaggctttgccgatgcgcgtctggcgaaactggcgggcgtgcgtgaagcggaaatccgcaaactgcgtgaccagtatgacctgcatccggtctacaagcgtgtggatacctgcgcggcggaattcgccaccgataccgcctacatgtactccacctatgaagacgagtgcgaagcgaacccgtccgttgaccgcgataaaatcatggtcctcggcggcggcccgaaccgtatcggccagggtatcgaatttgactactgctgcgtacacgcctcgctggcgctgcgcgaagacggttacgagaccatcatggtcaactgtaacccggaaaccgtctccaccgactacgatacttccgaccgtctgtacttcgagccggtgacgctggaagacgtgctggaaatcgtgcgcatcgagaagccgaaaggcgttatcgtgcagtacggcggccagactccactgaagctggcgcgcgcgctggaagcggcaggcgtgccggttatcggcaccagcccggacgccatcgaccgtgcggaagaccgtgaacgcttccagcatgcggttgaccgtttgaagctgaagcaaccggccaacgccaccgtcaccgccattgaacaagcggttgagaaggcgaaagaaatcggctacccgctggtggtgcgtccttcttacgtgctgggcggccgggcgatggaaattgtctacgacgaagccgacctgcgtcgctacttccagaccgcggtcagcgtctctaacgatgcgccggtactgctggaccgcttccttgatgacgcggttgaagtggacgtggacgctatctgcgacggcgaaatggtgctgattggcggtatcatggagcacatcgagcaggcgggcgtacactccggcgactccgcctgttccctgccggcctacacgctgagccaggaaattcaggacgtgatgcgccagcaggtgcagaagctggccttcgagttgcaggtgcgcggcctgatgaacgtgcagtttgcggtgaaagacaacgaagtctatctgattgaagttaacccgcgtgcggcgcgtaccgtaccgttcgtctccaaagccaccggcgtgccgctggcgaaagtggcggcgcgcgtaatggccggcaaatcgctgaccgagcagggcgtgacccaagaaattatcccgccgtactactcggtgaaagaagtggtgctgccgttcaacaaattcccgggcgttgacccgctgttagggccagaaatgcgctccaccggggaagtgatgggcgtgggccgtaccttcgcggaagcgttcgctaaggcgcagctgggcagtaactccaccatgaagaaacagggccgtgcgctgctctccgttcgcgaaggcgacaaagagcgcgtggtggacctggccgctaagctgctgaaacagggcttcgagctggatgctacccacggtacggcgattgtgctgggcgaagccggtatcaacccgcgtctggtgaacaaggtgcacgaaggtcgtccgcacattcaggaccgcatcaagaatggcgaatatacctatatcatcaacaccaccgcaggtcgccgggcgattgaagactccagggtgattcgccgcagcgcgctgcagtacaaagtgcattatgacaccacgctgaacggcggttttgccacgacgatggcgttgaatgccgatgccaccgagaaggtaacttcggtgcaggaaatgcacgcgcagatcaaaaagtcgtaaaccaagggtccggcggatattgctctaaccggacctgtaatataatgttgaaagggtttctgtaaagaaaccctttttttatcttgcgtaaggtcattcctggagaagtccgtttccgtaaccacattttcaatgtaataagcacgatattgctcacactaatcaatatttaagtcgcatactatcttgcatatccacaattttaatatggcttagtttttattagtttggacaggccgtagccagatttttaatttgtgaaatggtgtgcttatgtgtgaaaaatatgttgaaagaccgctttatttgttaattgctgactggatgatggcagagaaccgatggatcactgccagggagatttcccgtcaatttgatattgaacattgcaaagcaattaatacgctctcctatattctgtcagaagtgggggaaattgtttgtgaagtgaagatgatccctaaccaaattgcaggacgaggctgccagtgccagcgtctggtgaaagtcgtgagtatcgactctcaactctatcgccgattgaatcataatttgcaggaaagaaaagtgagcgtggcgaaagcgccgcgactgtctgccgttccccccacagagctaaaccgtgagcagaaatggcagatgatgctgtcaaaaagtatgcgtcgctaattgtctgtttaacctgatggcggggtaaacggtaattgacgcgtaggccggataagcgtgagcgcatccggcatcaattactgtgctgattttggcttcacgtccgtcgtgcctttcaggcgcggccggttttcttcgacctgcgttaacggcttcgtttcagataaccccgttcgacaacggatcgcaagatcctgatattctttggtattgaggcgtttccagtgcagctcctggtccgtaacctggcgtagtacgcgcgcaggtgaccccaccagcagttgccttgcctcaccctgaaatccggctttgacaaaactcatggcggcgacaatgctctcttcgccaatcactgcgccgtccataatgacgctattcatgccgaccagggcgtcccgtcccaccacgcagccatgtagaatagcgccgtggccgatatggccgttttcatgcacgatggtatcggtatcgcagtagccatgcataatgcagccatcctgcagattagagcctgcctccaggatcaggcgaccataatccccacgcaatgacgcgagtgggccaatataaacaccggcgcccacgatgacatcgccaatcagcacggcgctgggatggacaaacgcgtccggatgcaccaccgggatcagtccttcaaaggcgtaatagctcatagttgtacctcggtttttttgccggatggcggtgtaaacaccttatccggcctacggttgcgcatgtgctgtaggccggataagcgaagcgccatccggcatagtcacattaacgacctttccacaccggatcgcgtttttcggcaaatgcctgcggtccttcgagcgcatcttctgaatgcagtaccgacggataatgcttcagcacgccgctgcggatgtagcggtagccttcttctaccggcatttcgctggtcgcgcgataaatctctttcagcgccgcgatagccagcggggcgctattgaccagttgttgcgccagttcgcgcgcgctatccatcagttcgctctggctgacaacgcggttcacgactccccaacgcagcgcttcttcggcgctcattcgtctgccggtcattaccatttcgttgacgatagccggtggcagcagcttaggcagacgcaatacgccgccgctgtcaggcacgatgcctagctttgcttccggcagcgcgaagctggcgttttcggcgcagacaataaagtccgccgccagcgccagctcaaaaccgccgccaaacgcgtagccgttcaccgcggcgataaccggcttatcgaggtcaaatatttcggttaaaccagcaaagccgccggaaccaaaatcagcatccggcgcttcaccttccgctgccgcttttaagtcccagccagcagaaaagaatttctccccgccgccggtaatgattgctacgcgtaattccggatcgtcacggaaattaagaaaagcttcacccattgcaaagctggttttggcgtcaatggcattcgctttaggtcggtcgagggtaatttccaggatcgggccgttacgggtcagatgtaatgactcactcatagttcatctccagataaatagtttcccggcgggatggattcctgccggaaggtttatttcagattttttttgattatttttcctgaacagttgcgcggcaggtcggttctgatctccataaaagagggaaccttgaatttcgccatattgttttcgcaaaagctgaaaaactcggcttcgcttaatgtttcaccttcattaaggacgataaacgctttaatggcctcatcacggatcgcgtctttaataccaaccaccacaatgtcctgaattttcggatgtgcagaaataatattttccagctcgacgcaggagacattttccccgccgcgtttaatcatgttgcagcgtctgtcgacaaaatagaaatagccatcctcatcctggtaacccgaatcaccggtatgtaaccagccctctggttccagcgccctggcggttgcctccggctgcatgtaatactctttgaagatagtcttgccggggatgcctttaatacagatttcgccaatttctccggcgggcagcgggcgattttgatcgtcacggatttcggcttcatagctaaatcccacgcggccaatggagggccagcgtcgtttgtctccgggacggtcgccgataataccgacgatggtttcagtcataccgtaggaggtcagcagcctgacgccaaagcgttcggtaaaatcgtctttttcctgctcggataaattgagatagaacatcacttcgcgcaggtgatgctgcctgtccgttggtgcggcgggctggaccatcagcgtgcggatcatcatcggaatgcactcggtcaccgtcgcctgatatttacgtacctgatcccagaatgcccgggcgctgtacttttccaggagcacaaaggtgctgccggcggaaaaggctggcattgcggcggtacactggcagtcgatatgaaaagcgggcatcaccgtcatgtacacgtcatcatcgcgcagggcgatttgccaggcagagtagtagcctgcaaaacgcaggttatagtgggtaatcaccaccccttttggacgcgaggtggtaccggaggtaaacagaatttccgccgtatcgtcagtggataacgcgggcgtatagcacagcgtggccgattgacgtgcttgcagttgggaaaagtggctcacgccatcgtcagccggaagctgctcgccaatcagacagatatgattaagcggagtgctattgtcctggcgtatttcacggtacataggataaaactggacgctggtaaccagcagactcacctggctgttttgcaggatccaggcgctttcttcgcccagtaagcgggcattaatcggtaccataatagcgccgatttttgccagtccaaaccagcaaaagatgaattccggacagttatccagatgcagcgcgaccctatcacccttgcggatccctaaggagtaaaaaaggttcgccgtgcggttaatctcttcattgagcgaagcatagctaaactgccgaacgattccctcacaggattcgaaaattaacgccgttttatctccgtacaccccggccaggtcgtcccacatctgacgtaagttttgtccgccaacgatatccatattgctttatccactgaaatcaggcgtgagcgctaaccggaaaaccgattagcgcatcgcgtttaatcctcaactttggccaggcctttgccgaccagttccttaatatctgcttcgctataaccaatgtttttcagaatggcggcggtatccatgccgtgtgacggcatgccacgccagattttccccgggttgtttttaaatttcggcatgatgttcggccctttacaggtgcgaccgtccattgtttgccactgagtaatcgattcgcgggcaacgtactgcgggttaccttccagttccggaatggtgagcaccttcgcacaggcgatattcagctcagcaaagcgcgcctgaacttcggcgatagtgtgtgttgccagccaggcgtccagtttctcttcgacgagcgggccgtaagggcattccacgcgatggatgagctgcgtgccttccggaacttccggcgtaccaagaatatgggccaggccaatatctttaaaacactcgttgatttgcgtgatgccgaccaactccatgacgatgtaaccatcggcgcatttatacaggccgcaaccagcgtagtaggggtctttccctttcgtcatacgtggacagatttcgccgccgttgaagtagtccatcatgaagtactgacccatgcgcagcatcacttcgtacatggcgatatcgatgctttcacctttacccgtttcgcgtactttgtgcagggccgccagcgcggctgtcgtcgcggtcatcccggagaagtaatcggcggtatacgggaaggctggcatcggctgatcaacgtcgccgttttggatcagataaccactgaatgcctgcgcgatggtgttatacgccggaagattggtgtactcctcggtaccatactggccgaagccggaaaggtgggcaatgaccagtttcgggttatgttcccacagcacttcatcagtaataccacggcgggcaaaggccgggcctttactggcttcaatgaaaatatcggtagtttccatcagtttcagaaacgcttcccgaccttcatctttgaaaatattcagcgacagggcgtgcaggttgcggcgtgagagctgcgggtagttaggctgtacgcggatggtatcggcccatgcgacgttttcaatccagataacctcggcgccccattcggcgaacatctgtccggcgaatggaccggcgatttcgattcctgaaaaaacaacgcgtaccccagcaagcgggccaaaggttggcattggtaaatgattcatcatttttctcctggcattttttgcggtatgtaggccggataagcacagcgccatccggcatgattgcctgatggcgacgccccgcgtcttatcaggcctacaagggatcaattagcggtattgcttaagtaccgcacgacccaacgtcaggatctgcatttcatcagaaccaccagaaacacggtcaacgcgcaggtcacgccagaaacgcgtgatgcggtggttgcccgcgataccaacacctcccagtacctgcatggcggtgtctaccacttcaaacgcggcgttggcgcagaagtatttgcacattgccgcgtcgccggaggtaatcgtgccgttatccgctttccacgcggcttccagcagcatatttttcatggagttcagtttgatcgccatatgcgcaaacttctcctgaatcagctggaaacggccaatagcttcaccaaactgcacgcgctgattcgcgtaacgcgcagcgtcttcaaaagcgcacattgcggtaccgtagttggtcagcgcgacgaggaagcgttcatggtcaaactcttctttcacgcggttgaagccgttaccttcccgaccgaacatgtctttctcgtccagttcaacgtcgtcaaaggtgatttcacagcagctatccatgcgcagaccgagtttctccagtttgttgaccttgatacccgctttgctcatgtccacaaaccactcggtgtaaaccggtttatccggcgatgcaccgtctctcgccatgaccacgatgtacggggtataggcgctactggtgataaagcacttactgccattaagataaaccttaccatttttgcgtgtataagtggttttcagactaccaacatccgatcccgctcccggttcggtgatagcagagttccacatctgcttaccggtgccccggaacgccatgattttatcaatttgctcctgagtcccttcacgcaggaaagtgttaaaacctcctggcaattggtacaacacgtaagttggcgcgccaagacgtcccagctccatccagacggcggcgacggtaacaaaacccgcttccagaccgccgtgttcttccgggatcagcaggctatcaatacccatatccgccagcgcttttacaaaacgctcagggtagacgctgtcacgatcgcactcggcaaaataagcttcccagttctcactggccatcagttcgcgaataccggcgacaaacagctcctgttcgtcatttaagttgaaatccatctttcagcctcttgatcaattgggttaataagaattacttgtctttccagtgcaccttggcgtctttaataaaggacagcgtcaccataatgttgacgaagaacagcggacatcctccggcgataatcgcggtctgaatcggcttcaacccacccagcgccagcagaacgataccgatgatgccgaccagcactgaccagccgatacgcactaacagaggcggctcttcaccatcgcgaacttcacgacaggtcgacatcgccagggtgtaagagcaggcgttaatcagcgtgacggtggcaataaagcagaggatgaagaagccccacatggtggcggtgctgagcggcaaggcggcccaggtttcgataatggcgcgcgccacgccgtgttgctcaatcagttgcggaatgttgaggatgtttttatccatcagcagcagcgtgttgctgcccagcactgtccacaggatccaggtagacgcggtcagacccatcaccatcccgaagcacagttcacgtacggtacgaccacgggaaatacgggccaggaagatactcatctggatggcgtatataacccaccacgcccagtagaaaacggtccagccctgtgggaagccgcctttaccgatggcgtcggtatagaacagcatccgtggcagatgcattaacagcatcccgacggagtcggtgaagtagttcatgatgaagctggcgccgctgacgataaacacccagccgagcatcaggaagctcaggtagctacgcacatcgctggcgattctgacccctttttgcaggccgcaggccacgcaaatcgcgttcagaatgatccagcaggtaatgatgatggcatccaattgcagcgtatgcggaataccgaacagccattgcatacactcggtgaccagcggggtagccagaccgaggctggtgcccatcgcgaagatcagcgccaccaggtagaagttatcgacgatggtaccgaacaaccctttcgcatgcttttcaccgacgagcggtaccagcgtggagctggggcggatgacatccatcttgcgtacaaagaagaagtaggcgaaggccacagaaaggaagctataggttgcccacggcagcggcccccagtggaacaggctgtacgccaggcctatctctttcgcgcccgtggaatttggttccaggccgaacggcggggtggagatatagtagtagatctcaatagagccccagaacagaaccgcagcggatgtacaggaggcgaacatcatgaaaatccagctggcggtgctaaactccggtttttcgtcacctaatctctttttggcataggggccaaaaaccagccagaaccagccgaagagcatgacgaccatataccattcaaatgcccaaccccagacgttggtgacataactgaataccgcattaataacgacgttagcggcatcaagatctctgactgttagccagcaaagtatcccgacaattattaatggcggaaaaaaaaccttcggttcaattcccgattttttcttttcatttttcataagtgaattccagtgtgaaaacgaaatttatttagcgtgccagtccatgaacgtttgtttatttattattaatgatttgttgataagtttttaacctctgggacgcctcaatgagtaactcatgatgggtattcacttcgggtgattctgttatcttcgtcacacttttttgcgttgattattttgtgtctaaattttgatttttgctttatttatcaattgattggttgtggttttttaacttttttaagtatctggcgttcaatattgttgagccagcaaacaatattgaaaattttcatatttggcatatttctttcaatattggtgaggtgcgtaacactattgaaagttacgaatatcaatgtgtgacattttcaatattggtgattaaggttttatttccgaattaaagagcgtgatatctgtatttaacaccgccgatataaatacgtttccttcatgatttctggagatgcaatgaagataattacttgctacaaatgcgtacctgatgagcaggatattgcgattaataatgctgacggaacactcgatttcagcaaagcggatagcaaaatcagccaatatgatctgaatgcaattgaagctgcttgccagttaaaacagcagttgggagacgctcaggttgtcgccatgagcgttggcggcaaagcgctgaccaatgcaaaagggcgcaaagatgtcctctctcgtggccctgatgaactgattgtggtcattgacgatcaatttgagcaggcgctgccgcaacacaccgctaccgcgctggccgccgcggcgcaaaaatcaggtttcgatctacttatctgcggcgacggttcttccgatctttatgctcagcaggttggtttgctggtgggcgaagcgctgaacattccggcgattaacggcgtgagtaaaatcctctctcttaccgacagcacattgacagtagaacgcgaactggaagatgaagttgaaacgctgagcatcccgctcccggcggtgatcgcggtttccaccgacattaacaccccacaaatcccttcgatgaaagccattcttggcgcggcgaaaaaaccggttcaggtctggtcgcctgcggatatcgggctgaacagcgtatccgcgtattccacacaacaggttgccgcaccgaagcagcgcaagcgtcagcgtgtggtgattgaaggtgacggtgaagaacaaatcgccgcgtttgtcgagaatctgcgcaaaatcatttaattatcaggggatgttatgaacaaattttccagtgtctgggtattcagcgataccccttctcgtctgcccgaactgatgagtggcgcgcaggctgtaggtgaaaaagttaacgcgttcgtactgaacgaagcggatagcgcgacagcatgtcatttgggcgccgatcatgtctggctgctcagcggcaaaccagaagaccgcatgatcgaagactacgctgctgcgatggctgagactattcgtcagcatagtgagggcggcgcggtgctgctgccgaatacgcgtcggggcaagctgttggcggcaaagctgggctatcgcttgtcggctgcggtttccaacgacgccagcgaagtctccctgcaggatggaaaagcggcggtcaaacatatggtctacggcggtctggcgataggggcagaaaccatcgcttcgccgtttgccgtgatcacgctcagcagcggaacgtttgacgcacaagacccggacacttctcgcagcggcgagatgcataccgtgcagtggcaggctccggccactgccgtgacccgcaccgcaacccaggcgcgtcagagcaacagcgttgacctcgacaaagcgcgtctggtggtcagcgtgggacgcggcatcggcagcaaagagaatatctcgctggccgaagcgctgtgccagaccatcggcgccgagctggcctgttcccgcccggtagcggaaaacgagaagtggatggagcacgagcgctacgtcggtatctccaacctgatgctcaaacctgaactgtatctggcagtggggatctccgggcagatccaacacatggtcggcgccaacggcgcgcagacgattttcgccatcaacaaagataaaaacgcgccaatcttccagtatgcggattttggcatcgttggcgatgcgctgaagatcctgcctgcgctgacggctgccttagcgcgataaaccatttcgggcaggatgcgaaggtatcttgccgctgacaggagtacgtatgtccgaagatatctttgatgccatcatcgtgggtgcaggtctggccggttcggttgcggcgctggtgcttgctcgcgaaggtgcacaggtgctggttatcgagcgtggcaattctgctggcgcgaagaatgtcaccggtgggcgcttgtatgcacatagcctggaacgcatcattcccggctttgcggatcaggcccccattgaacgcatgatcacccacgaaaaactcgcctttatgaccgacaaaggggcgatgacgatggattattgcaacggcgaggacgccgcatcgtcgcaggtttcttattccgttttgcgcagtaaatttgacgcctggctgatggagcaggccgaagaggcgggggcgcaactgatcaccggtattcgcgtggataacgttgttcagcgtgatggcagagtcgtgggcgtggaagccgatggcgatattctggaagccaaagtcgtaatcctcgctgacggggtgaattctctgctggctgaaaagctgggcatggcaaagcgtgttgaggcatcgcatgttgctgtcggcgtgaaggaactgatcgaattgccgaagtcggtcattgaagatcgtttccagttacagggcaacgaaggtgccgcctgtctgtttgccggggcgccaaccgatggtctgatgggcggtggcttcctgtatacgaatgaaacaaccctttccctggggctggtctgcggtcttcatcatctgaaagacgcgaaaaaatcggtcccgcaaatgctggaagatttcaaacagcatccggcagttgcgccgctgatcgccggtggcaagctggtggaatatgccgcgcacgttgtacccgaggcgggaatgaatatgcagcctgaactggtgggcgatggcgtgctgattgccggagacgctgccggcatgtgtatgaacctcggctttaccattcggggtatggatctcgccatatccgcaggcgaagcggcggcgaagacggtgctttcggcgatgaagagcgacgattttagcaagcagtcgctggatgaataccgtcagcatctggacgaaggtccgatgcgcgatatgcgtatgtatcagaaactgccagcttttcttgataatccccgcatgtttaccgcttatcccgaaatggcggtcagtatcgcgcacgacctgttcaccgtggatggctccgctccggtgccgatgcgtaaaaaaatcctgcgccatgcgaagaaagtgggcttcatcaacctgatgaaagatggcctgaaaggagtgaccgtattatgacatctcccgttaatgtggacgtcaaactgggcgtcaataagttcaatgtggatgaagacagcccgcacatcattctcaaaaccgatcctgataaacaggcgctggaggtgctgattaaggcctgcccggcgggactgtataaaaagcaggacgacggcagcgttcgttttgattacgccgggtgcctggagtgcggaacgtgccggatcctcggccttgatacggcgctggaaaaatgggaatacccgcgcgggacgtttggcgtggagttccgctacggctaataagtacgaagttgtgcccccgttggccggataagatgcggtagcgtcgccatccggcaatcatgtggcgccaatgccggatggcggcggaaacgccttatccggcctacagatgcgctttgcccgtgttgaaacaggacatcaccatgcagcagcccaggaactttgatgaccttaaattctcctccattcatcgcagaattatgctgtggggaagcggcggcccgttccttgatggctacgtgctggtgatcattggcgtggcgctggaacaactgacgccgctattgcaccttgatgctgaatggattggcgcgctcggcgcggctacgcttgccggactgtttatcggcacctcgttgtttggctatatttgcgataaagtcgggcggcgtaaaatgttcctgcttgatattatcgctatcggcgttatctccgtggcgaccatgtttgtttccacgccgcttgaattactggtgatgcgcgttttaattggcattgttatcggcgcggattaccctatcgctacttccatgattacggagttttccaacacccgccagcgcgcgttctccatcggttttatcgccgcgatgtggtacgtcggcgcgacctgcgccaacctggtgggctactggctgtatgacatggaaggcggctggcgttggatgcttggcagcgcctttatcccgtgcttaatcattttgattggccgctttgacctgccggaatcgccacgctggctattgcgaaaaggacgggtaaaagagtgcgaacaaatgatgatcaaactgttcggcgaaccggtctgctttgacgatgagccgccgcaggagacccgcttcctgcagttgtttaaccgccgtcattttccgtttgtactgttcgttgcggctatctggacctgtcaggtaatcccgatgttcgctatctatacctttgggccgcagatcgtcgggttactcggctgggagcaggggcgcaacgcggcgctcggcaatgtggtgattagcctcttttttatgctgggctgtataccggcgatgttctggctaaacagtattggccgtcgccctctgcttattggcagcttcgccatgatgactatcgcgctggcgctgctggggctggtgtcaaatctgggcatcatactggtcgtggtggcgtttgcggtatacgccttcttttccggcggaccgggcatactgcaatggctttatcctaatgaactcttcccgacggatattcgcgcttcggccgtgggggttatcatgtcgttaagccgcatcggaaccattgtctccacctgggcattaccgatttttattactcgttacggtattaataacgtcatgctgattggcgcgttgatttcgttagtcgggcttggcgtatcggtgatgtttgccccggaaactcgcggcttgacgctaacacagaccggaaacatgactttgcgcggaacgccatcggataaccctcattaagagtgttctgcatttctccctgcttttcgccaataacgctacagttaacagtcacatgctaaaacaactgaaaagcagggagaacaccatgcaaaaacgtcttatgaccgcactgtttaccgcagcaacactattcaccgtcgcaggatgctcttctaaccaggcggttgaaaccacggatggcaaaactattgtcaccgacgggaaacccgaggtcgataacgataccggtatggtgtcttacaaaaacgccgccaccgggaaaaccgaacagattaaccgcgatcagctgaaaaatatgagcgagctggataattaattaaattttttctggttagctgctcaataatattctctctttatgcgcatccatttattcccatgcgaataaacggatgtctgaacaggcagggacgccggaaaacgtcgaaatacgttcgcccgtgttcccgctttccccaccgcgctgtccgcttacatgaggttacactcatcgacatttctctgaacagcggctcaacatttcccggaaaaaaacatatcgcagggcatttatccttatgattaggtataaatgatgaggtataaggaacaggagtctgtaatgaaactgaaaccaatacctttttatttgctcgcgctattttctgccgcctccggggctacggagataaacgcctgcaaagacctgatcggaacatggaaaaccacggcagataacccgccttataccatgacaatattgccgccagtagaaagctgcggggaaaaatgtgtgaaactgaacgtgcagtatgaacttgacgtgactcaccgcaatgcgctttattgccatgaaggacacgagggggtaaaagggcagggacccatggtgatagcatttgaaggggcgtatggtggacacgctattggaacctataaccgacagctgcaattactttgggctggcgtaataccgaaaaataaaaaggggaaatggataacgaaaatggaaaattactggttcaggcaggtaaaagcgcactaaacatcatcttaaaacagcccgcaaaaccgtcttatttacgaagggcttactgcctgcgcgcgcccattccaacggcttgcctgccccggatgaactgttgataaaaaagagggccagcatctgtttccagacggccctgagtggattgtgacgtaacatggcaccttgctggcgctctcttattatttcatgcctgtgccctcgttatggcgcaatcagagctttatttcgtcgcatcgttataaacttcggcaacggcttcaaaattcggaccatgctcacgtgcagcgataatatgataatattttccgcctttcgcatcggctaattctgacagtttttcgcgtagatcagagggtgaggaaatctgcccgccactctgggacacatttatggtgccgaccttaaccagtttgaagtggctgatttcttgtttagagacctgctctgccgcaagtgtgctgaatgaagcaaccgttgccagtaatgcggcggcaataatgcgttttttcatagttctgttcctgttgcattgatgataaggtttgcgcaatatcagtaatccgtaacgaaattatttatccccttcatacttcaggttgcttatgggttggctacggattactcggcccacccatgggcctcgccctgacgggccgtcgcacgcgacgttcaaatctgctcccggcaaatttgtcgctcacctcagtcacataattatctatgctcctggggactcactcccttgccgcctttaagcaactcgaattattttgggtaataacctcggttgattatctgaaaatagccttatttggtgtgaccgtcttatatcttgttatagtcacctctttatgttgttgtcaatgtaaaataatgcactgccagctaaaaagaaacttaaccccctgtaaataatagtttttatattatttcttttaatggcgtaatttttattgaatcacgcggcaatacgctagttttattcataagcaacataacagaattgagttatgttttaatttcccagagtgatattaccggttgtatgtctatggttgcgcggcctgttactgatagtgtttctttcggggcgattttattgtagcggcatagggtaatcaccgtagttgaagggaaaaggcacgaacacagagctatagagtatgtttaataatgtatttttttatgaagtaatgtctgcagttgtatctctaaaataaaaacaatgaacttttcatctaaataatttttcaatgaattatgctcatttattaatatatttctaatttgaaatacaaatcaatttataacacatattcttacccggaaggcattgatacatatccacgcttcctcgtacagtaataaatgaatatgtgataaagttactgactacaggtataataatatgagtaataaaaaaaatctgtccgcagaagagacggatcttacgcgtaggaaactgttaaccagcgccggtattcttgccgccggcggtatgctatccggcgcggtaaaagctgatgaaaaatgtgccgtcaaggcgaaaccggcgtgggataaaccgtttaccggcgaaatcccggaaaaattgccagaaggatataatattctgttagtcgtgaccgaccaggagcgtttttttcctacgtttcctttcccggtacccggcagagagcggctcatgaaaacgggggtgacattctgtaatcatcagaataccagtaatgtctgtacgccttcccgctccgtattgtataccggcttacatatgccccagacaaaaatgtttgataatctgggcttaccctggatgccttatgaccttgaccccgctcttggaaccacaggccatatgatgcgggaactgggatactatacggcctataaaggtaagtggcatcttacagaaaaactggagaagcctttgcctgacgaaaaagatgaggatattgatgtcggggatattcctgaaccagaattacataaaattatggaaaaatatggttttgctgactatcacggcatcggcgatattataggccatagtaaaggcggctatttttatgattcaaccaccacgtctcagactataaattggttaagatgcaaggggcagcccttgaatgaccaacacaagccctggttcctggccgttaacctcgttaatcctcatgacgtcatgtttattgataccgataaagagggagaaaaggtacagtggcgtggcgagttggatcaggatgataataccctggcgcccacgcagccgccggaaaacgagctttatcaggcaagctggccgaactatccgctgccggcaaacaggcatcaatcattcaatgagcagggaagaccgccggcgcatcttgaataccagacggcgcgcgctgcgctggaagggcagtttcctgatgaagatcgtcgttggcgtaaactgcttgactactatttcaactgtatccgcgattgtgatactcaccttgaccggatattaaatgaactggatgccctcaagttaactgataaaacgattgttgtatttactgccgatcatggcgaattaggcggaagccatcagatgcacggtaaaggcgcttccgtttataaagaacagatccatgtaccgatgattatttctcacccggcgtaccccggtaataagaaatgtcaggcgttgacctgtcatcttgatattgcgccgacattagttgggctgaccggtttgccggaagaaaaacagcaccaggcgttaggcaaccgcaaaggcgttaattttagcggattgctaaaaaacccggagagcgttgcggttaatgcggtgagaaatgccagcttatattgctatggcatgatcttgtataccgatgcccattatctccaccgtgttatcgcgctacaaagagataaacaaaaaacggtggcgcaaatcaagcaggaaatatcccatttgcatcctgattttagccatcgttcagggacgcggatgattaacgatggtcgttataagtttgcgcgttatttctcgctaagggagcataatacgccggaaacctgggaggatcttattaagtacaacgatcttgaactttacgatcttaaaaatgatcccgatgagaaccataaccttgctgctgataaacagaaatatcaggatctcattcttacgatgaatgaaaaactgaataaaattatcaaagacgaaattggcgtggatgacggcagttttatgccggatgcggcccatgagccgtgggatcttactattgagcaatttaaccgcatggcgaaagattaagagcctggcccattaggctattttattcgtcggcgatctggcatccagcgtgtctggaggttcagatgctgttggcgctgcgcttattgggtctgtatcatcatgtaatggattgatattacagtcattacaggcaaatttagcgcagcgccgcccggtaagaaggccttaaaccgattggtcagcgatttaaggctactatcatcaccgacctttccacaccggatcgcgcttttccgcaaacgcctgcggcccttcgagggcatcttcggggagcaggatggcgtcaactccttgcgggcgttaattcaattttttctggttagccgctcaataatattcactattagcctggcgaatttgtcactacactttgtgataaaaaacagatcatcacaggctaatcatgatcctcattatttatgcgcatccgtatccgcatcattctcatgcgaataagcagatgcttgaacaggcagggacgctggaaaacgtcgaaatacgttcgctttatcacctctatcccgatttcaatattgacgttgccgccgaacaggaggcgctgtcgcgcgcgagtcttatcgtctggcagcatccgatgcagtggtatagcgtccctcctttactcaaattatggatggataaagtcctcacccacggctgggcttacggtcatggcggtacggcattgcacggtaaacatctgctgtgggcggtaacgaccggcggtggtgaaaaccattttactatcggttcacatccgggatttgacgtcctttctcagccgctacaggcgacggcgctctattgcggcctcaaatggctgccgccgttttccatgcactgcacgttcatttgcgatgacgacaccttacaggcgcaggcgcgtcagtataaacagcgtttactggcatggcaggaggtgaatcatggatagccatactctactgcaggcgctgatctatcttggttcggcggcgttgattgtgccgattgcggtacgtttgggcttaggatcggtgctggggtatctgattgcgggttgcattatcggcccctgggggctacggctggtaacggacgccgaatctattctgcattttgcggaaatcggcgtcgtgctgatgttgtttgttattgggcttgaactggacccgcaacggttatggaagctgcgcgcctcggtatttggcggcggcgcgttacagatggtggtctgcggcggactgattggtctgttctgtatgtttcttggcctgcgttggcaggtggcggaactgattggcatgacgctggcgctttcgtccacggctatcgccatgcaggcaatgaatgagcgtaacctgaccgtttcacaagtagggcgtagcgcatttgcagtgctcttgttccaggatatcgcggcgatcccgctggtggcgatgattccgctgctggccgccagcggcgcatccaccacgcttggcgcgtttgcgctatcggcgttgaaagtcgcaggcgcgttggcgctggtggtgttgctgggacgctacgttacgcgcccggcgctgcgctttgtcgcgcgttctggtttgcgggaagtgttcagcgccgtggcgctatttctggtgtttggtttcggcctgttgctggaagaggttgggctgtcaatggcgatgggcgcgttcctggcgggcgttctgctggcgagttcggaatatcgtcatgcgctggaaagcgatattgaaccctttaaggggctgctgctggggctgttctttattggcgtcggcatgtcgattgatttcggcacgctggtggagaatccgctgcgcattctgctgttgttggccggttttctggcaatcaaaatcgtcatgctgtggctggtcgcgaggccgctgggcgtaccggcaaaacagcgtcgctggtttgccgtcttattaggccagggaagtgagtttgcgtttgtggtttttggcgcggcgcaaatggcggatgtacttgagccggaatgggcaaaagcgctgacgctggcggtcgcgctgtcgatggcggcaacgccgatttttctggtgctgctgacgcgcatggagaagaccgcgacgggggaagcgcgcgaggcggatgaaatcgacgaagagcaaccgcgggttattgtggccgggtttggacgatttgggcagatagccgggcgtttgctgctgtcgagcggggtgaagatggtggtgctcgatcacgaccccgatcatatcgaaacgctgcgtaaattcggcatgaaggttttttatggcgatgcgacgcgtatggatttactggaatctgccggagcggcgaaggcggaggtattgattaacgccattgacgatccgcaaaccaatttgcaactgagtgaactggtgaagtcgcatttcccgcatctgcagattatcgcccgcgcccgtgatgtcgatcattacattcgcctgcgccaggctggtgtggcgatgccagaacgtgaaaccttcgaaggcgcgctcaaaagcgggcgacaggcgctggaagcgctggggctggggcgttatgaagcccgcgagcgcgcggatctgttccgtcattttaatacccggatggtggaagagatggcgaaaggggaaaacgatccgttatctcgcgccgccgcctataaacgtaccagcgcgatgttgagcgaaattattaccgaggaccgggagcatctgtcgttgattcagcgccacggctggcagggaacggctgagggcaaacattccggggaggccgctgatgaacccgaggtcaaaccgtcaatctaaagtaaaaaatgtgatgttctgcaaactttactgctaattggctgtttttgaactactgtaatgctggcgctccacatcaaatgagtggcgtcgccagcagaacgaaaaattttcgtgctcatcctcttttcgtcagtcgacgaaagattgcgctttacgtatagtggcggcaattttttttgtatcaggaaataattaatgatcagtctgattgcggcgttagcggtggatcgcgtcatcggtatggaaaacgccatgccgtggaacctgcctgccgatctcgcctggtttaaacgtaacacgttaaataaacctgtcgtcatgggacgtcacacctgggagtccatcggacgccccttaccgggacgtaaaaatattgttatcagcagccagccaggcaccgacgatcgcgtgcagtgggtgaagtctgtcgatgaggcgattgccgcttgcggcgatgcgccggaaattatggtcattggcggcgggcgcgtgtacgagcagttcctgccaaaggcgcagaagctttatctgacgcatattgatgcggaagtcgaaggcgatacccattttccggattatgaaccggatgactgggaatcggtattcagtgagtttcacgatgccgacgcgcagaattctcacagctattgtttcgagattctggaacgtcgttaacgctgtagtgccggatggcggcgaaacgccttatccggcctactcttgagccagatgtagccggatgtaggcctgataagcgtagcgccatcaggcataaatctatcaggcgttgaccgcttcgccttcgcccatatccatctggcggtttgacggctgcacaaaatactgtttatcttcccagcgtaaacaggtcaactccccgccccagcagcagccggtatccagcgcgtaaataccttccggcgtccctttcccttccagcgacgcccagtgcccgaacgcaatactgtaagcctcgctcaccggccccggaatggcgaaccacggcttcagcggcgcaggggcattttccggcgacgctttgctgtacatatccagttgaccgttaggaaagcagtaacgcatacgggtaaaggcattagtaataaagcgtagccgcgccagaccgcttaactccggcgaccagttattcggcatatcgccatacatcgcgtcgaggaaaaacggatacgagtcgctcgacagcaccgcttcaacatcgcgggcgcactcttttgccgtctgcaaatcccactgcggggtaatacccgcatgcgccatgaccagctttttctcttcatctacctgcaacagcggctgacggcgtaaccaattcaacagctcatcggcgtccggcgcttcaagaagcggggtcagccggtctttaggtttgttgcggctaatcccggcgaatacggccaacaggtgtaaatcgtgattccccagcaccaaacgcacgctattgccaagtgatttgacgtagcgtaacacgtccagcgaaccgggaccgcgggcgaccaaatcgccagtcagccatagagtgtctgtatctggcgtaaattccacttgctgtaataaggcgatcagttcgtcgtagcaaccgtgaacgtcgccgatgagataagttgccattgttataattttagtgaatgagtgtagggacggcgagtcgaaacacgggaatgtcgatggtaaaggcgtcgccattttcatcgatcatttcgtaatgaccctgcatggtgcccagcggcgtttcaattaccgcgccgctggtgtactgatactcttcgccaggcgcaatgcgcggctggacgccaaccacaccttcgccctggacttcggtttcacggccatgaccattggtaatcagccagtagcggcccaatagctgcactggcgcccggcccagattgcggatggttacggtataggcaaaaacgtaacgttcatcgtcaggtgaggattgcgcctcaatgtagacgctttgcacctgaatacacactctgggcgaattgatcatgtttaactctccttcaaaggcgcgttttccgacagatagttggccatctggcagtactgcgcgacagagatattttccgcgcgcattgccgggtcaatacccatttccgtcaacgtctcaacgctaaaaagattgccgagactattacggatcgttttacggcgctggttaaaggcctcggtggtaatacggctcaacacgcgaatatctttaaccgggtaaggcatcgttgcgtgtggaaccagacgcaccacggcggagtccactttgggcggcggcgtgaaggcggatggcggcacttcaagcaccgggatcacctgacagtaatattgcgccatcacgcttaaacgaccatacgctttgctgttcggccctgcaaccagacgatttaccacttctttttgcaacataaagtgcatgtcggcaatggcatcagtatagctaaagagatggaacatcagcggggtggagatattatagggcagattgccgaacacacgcagcggttggcccaactgcgcagacagttcgccaaagttcatggtcatggcgtcctgctgataaatagtcagcttcggccctaaaaacggatgggtttgcaaacgcgccgccagatcgcggtcaagttcaatgaccgtgagcttatccagtcgttcgccgaccggctccgtcagcgccgccagaccggggccgatttcaaccatcgcttggcctttttgcggattaatagcagaaacaatactgtcgatcacaaaccgatcgttgagaaagttttgcccgaagcgtttacgggctaaatggccctgatggactcgattattcattgggtattaacaatcattttgatggcgagattaagcgccgtaataaaactgccgacatccgcttttccacggcccgccagttcaagcgcggtgccgtggtcaacggaggttcgaataaaaggtaggccgagcgtaatattcactccccgaccgaatccctggtattttagcacgggcaggccctgatcgtggtacattgccagcaccgcgtcggcattatcgagatatttgggctgaaacagcgtatcagcaggtagcggcccgttgagtttcatcccctgcgcccgcagctcgtcgagcaccggaatgatggtgtctatctcttccgtgcccatatgaccgccttcgcccgcgtgcggattcaggccacagacaagaatgcgcggttcggcaataccaaatttggtccgcaaatcgtgatgcaaaatagcaatcacttcgtgcaaaagcgcaggggtgatggcgtctgcaatcgcccgtagcggcagatgcgtggtcgccagcgccacgcgaagttcttcggttgccagcatcatcacgacttttttcgcctgcgaacgctcttcgaaaaactcggtatgaccggtaaacggaatgcctgcgtcgttaataacgcctttgtgcacggggcctgtgatcagcgcggcaaattcaccgttcagacagccatcacacgctcgcgccagcgtctctaccacgtaggggccattttctaccgtcaactgaccggggatggcaggcgcgcgcagcgagaccggcaatagggtcagcgttcccgcgggctgcggcgcagcggggacatcaggcgagtaagggagaagcgagaggggcaggccgagcatggcggcccgctccgtcaggagcgcgccgtccgcacagacgaccagttcaatcggccacgcgcgttgcgccagttggacgacaagatcggggccaatcccggcgggttcgccgggagtgataacaacgcgttgcgcactgctcattagttactcaaaatcttaacgtaagcgctggcgcgctgttcttgcatccaggtcgccgcttcttctgagaacttacggttcatcagcatacgataagcgcgatctttctgcgccgcatcggttttgtctaccttacgcgtatccagcaattcgatcagatgccagccgaaagaggagtgtaccggcgcgcttatttggcctttatgcagcttcgtcagcgcgtcgcggaacgccggatcgaaaatatctggcgtagcccaacccaaatcaccgccctggttagcggagcccgggtcctgagagtactctttcgccgcagcggcaaatgtggttttaccactcttaatgtcagccgcgatttcttccagcttcaggcgcgcctgctgatcgttcatgatcggcgacggcttaagcagaatatgacgagcgtgaacttcggtcacggagatactctggctctgaccgcgcaggtcgtttactttcagaatgtggaaaccgacgccggagcgaatcgggccgacaatgtcgcctttcttcgcggtgctcagcgcctgggcgaaaatccccggcagctcctggatacggccccagcccatctgaccgccttttaacgcctgctggtcggcagagtaggtaatcgccagtttgccgaaatctgcgccgttacgcgcttcttcaacaatgctttccgcctggcgctgtgcgtcgttaacctgctcggaggttgggttttccggcagagcaatcaggatatggctcaggttcagctcggtgctggcgtcgttttgggtgccaatctgttttgccagcgcgtcaacttcttgcggcaaaacggtgatacggcgacgaacctcgttgttgcgcacttcagagataatcatctctttacgaatctggttacggtaggttgaatagttcagcccatcgtaagccagacggctgcgcatctgatccatcgtcatattgttttgtttggcgatgttggcgatggcctgatccaactgctcatccgtgatcttcacccccatcttctgacccatctgcaggataatttgatccataatcaaacgttccaggatctggtgacgcagcgtggcgtcgtccggaagctgctgacctgcctgacccgcgttgagtttgactgattgcattaagccatcaacgtcgctttccagcacgacgccattattgacgacggctgcgactttatcgactacctggggggcagcgaaactggtattcgcgatcatggcgataccgagaagcagcgttttccagttcttcatactttttccatttcaattaaccgcaatgcggattacgttgtaaatcaatcagattacatagagctttggtacggcagaatgttcgaacgcaacatttcttgcgtgccgaggccgtagttagagctcaaaccgcgcagctcaatgttgaagccaatcgcgttatcataaatcgcgtgttgtttatcgttatcccaaccgttcagcttacgttcgtatccgacgcggatcgcatagcagcaagagttgtactgcaagccgagcatctggtctgcaggtttgctcgaattggtatcgaagtagtacgcgccgacaatcgaccagcgatcggcaatcggccaacttgccaccgcgcccacctggttgatgccgtttttatactgctctgccgtggaataatacgaaggcaacgtagcctgaatatattccgggctggcatagcggtagttcaactgtaccagacgatcctgatcccgacggtattcgaggctgctgctgctggtagcgacgctatccagacgggtatcgtactgcactccgctacgcagcccccagcgttctgaaatacgccagtaagtgtcgcctgcccaaaccagcgaaccggttttgtcgtcattctcccatttaatgttgtcatcgccggtgcgagactccgtgaaatagtagatttgaccaacagaaacgttaaaacgttcaacggcggcatcatcataaatgcgtgttgtgacgccggtcgtgacctggttggcggaagcaatacggtcgagaccgccataagtgcggtcgcggaacaggccgttatagtcggattgcagcaaagaagaatcgtagttatagatgccgctctggtcgcggtacggcacatacaggtactgcacgcgtggttccagcgtctgggtataccccggcgccagcatcgccatatcgcgttcgaagatgagcttaccgtcgactttaaactgcggcatgacgcggttaaccgaatcttccagcttatttttattgtttggatcgctgttatagctgtccagattcgtttgctgatagtgcgtcgccatcagcttcgcttcggtgttcaggctgccccagcggttggagagcggcaaattgatggttggctccaggtggacgcgggttgcttccggcatattgtctttggtgttaacaaagtgcaccgcctggccgtaaatccgggtatcaaacgggccgagatcgttatggtagtagttaacgtctaactgcggctccgctgaatagctgctggtgttttgatcgttaaagacctggaattgtttggtcgacaccgtagcgtcaaagttttgtacggcgtagccgacgctgaatttctgcgttgcgtaaccgtcggtactggaaccgtacttactgtcgaaatcgttaaagtagctggagtcgctgactttggtgtaatcgacgttaaaacgccacacctgatccatcacgcctgagtgctgccagtagaataaccagcggtgcttatcgccctctttgggatgatcgtcctcgtagactttatcagaaggcagataatctaattccatcaacccggcgcctgcctgcgtgagataacggaattcgttctcccacataatattgccgcggcggtgcatatagtgcggggtgatggtggcgtccatattgggcgcgatgttccagtaatacggtaagtagaactcgaaatagttcttggtcgtgtatttcgcgttcgggatcaggaaacctgagcgacgtttgtcaccgacgggtagctgtaaataggggctataaaagatcggaaccggacctactttaaaccgggcgttccagatctccgcaacctgttcttcacggtcatggatgacttcactccccaccacgctccaggtatcggagccaggcagacaggaggtaaagctgccgttttccagaatggtataacggttttcgccgcgctgcttcatgagatcggctttaccgcgcccctgacggcccaccatctggtaatcgccttcccagacgttcgtgtctttggtgttcaggttcgcccagcccttcggccctttaaggatgacctgattatcatcataatgcacattacccagcgcatcgacggtgcgtacaggttccggctgaccttccgcctgcttctgatgaagctgcacttcatccgcttgcaggcggctattcccctgcataatgtccacgttgccggtaaaaacggcatcgtccgggtagttacctttagcgttatcggcattgatagtaaccggcagatcgttggtatcgccttttaccagaggacgatcgtagctcggcacgcccaacatacactgtgaggcgagatcggctgccagcccctgatgactataaagggcgctggcgatcatggtggccagaagagtgggaatacgttttttcatacgttgtatttattgttccatcatcggtagcgttgcgcgtgacaaacggtcacagcctaacttactcatcttcgctgcgccagtgttaatcctgccgtttagcgtctgtggtgttaggcacggcattgaatgacaggtatgataatgcaaattataggcgatgtcccacaattgaccgtagccttcattcgcagaaaagcaccttattttgtgggagatagcctcaccgatagcgtaacgttttggggagtctatgcagtactggggaaagataattggcgtcgccgtagccctgatgatgggcggcggcttttggggcgtggtcctgggtctgctggtgggccatatgttcgacaaagcccgcagccgaaaaatggcgtggtttgccaaccagcgggaacggcaggcgctgttttttgccaccacctttgaggtgatgggccacttaaccaaatcaaaaggacgggtgacggaagcggatattcatatcgccagtcagttgatggatcgtatgaatttacacggcgattcacgtactgccgcgcagaacgcctttcgggtcggaaaagcggataattacccattacgtgaaaagatgcggcagtttcgtagcgtctgcttcgggcgttttgatctgatccggatgtttctggaaattcagatccaggcggcgtttgccgatggctcgctacaccctaatgagcgggaagtgctgtatgtgattgcggaagagctaggtatttcccgcgtacagttcgatcagtttctgcgcatgatgcagggcggcgcgcagtttggcggcggttatcatcaacagtccggcggcggctggcagcaggcgcagcgcggcccgacgctggaagatgcctgtaatgtgctgggggttaaaaccaccgacgatgcaaccaccattaaacgcgcttatcgcaaactgatgagcgagcatcatccggacaaactggtcgcgaaaggtttaccgccggaaatgatggaaatggcgaagcaaaaagcgcaggaaattcagaaagcgtatgagctaatcaaagaacagaaaggcttcaagtgattgaattgccggatgcggctagcgccttatccggcctacgttaatgaatgtaggccgggcaagcgaagcgccccggcataaattggctctgagtttaaaaatctgccgggactttaaacgtcatgttggtgccgtaagcgggatgggtaatggtcagcatttcggcgtgtaactgcaaacgcggcgccagtgacaacgcttccggcgaggcgtaaaaccgatcgcctaaaatcgggtggcctaacgccagcatatgcacacgaagctgatgcgaacgtccggtgatcggcttgagcaccacgcgggcggtattatccgccgcaaactccaccacgttatattccgtttgcgccggtttgccggtttcataacacactttctgctttggccggttcggccagtcgcagatgagcggtaagtcaaccagtccttccgccggggagggatgcccccatacgcgcgccacatactgctttttcggctcccgttcgcggaactggcgttttagctcccgttccgcggctttggtcagcgccactacaatcacgccgctggtggccatatccagacgatgcaccgactctgcctgcgggtagtcgcgctggatacgcgtcataatgctgtctttgtgcgcttccagacgccccggcacggacaacaggccgctgggcttattgaccaccataatgtgctcatcctgatacaggataaccagccagggttcctgcggcggattgtagttttccatccccatgtacggctccgttattggtgcgtgacgacgataagacgcagcgcgtccagacgccagcctgcctgattcaggctttccagtacctgctgacggttgctgtcgatagcggcaagttcgtcgtcgcgaatgttcgggttgacggcgcgcagcgcttccagacgcgacagttccccggacagtttttcatccgcctcgcgacgcgcgttatcaatcagcgctctggcggacttttcaatctgcgtctcgcccagttgcaaaatggcgtggacgtcctgttgcacggcgttcaccagtttgctgccggtgtggcgattcacggcgctgagctggcggttgaaggtttcaaactcgacctgggcggccagattgttgccgtttttatctaacagcatacgtaccggcgtcggcggcaggaagcggttcagttgtagctgtttcggcgcctgcgcttccacgacgtaaaccagttcgaccagcagcgtgccgactggcagcgctttatttttcaacagcgaaatggtgctgctgccggtatcgccggagaggatcagatccagtccgttacggatgagcggatgttcccaggtaataaactgcgcatcttcgcgagacagggctacgtcacgttcaaacgtgatagtacagccgtcttccggcaggccggggaaatccggcaccaacatgtggtcggacggcgtcagcacgatcaggttgtcgccgcgatcgtcctggttaatgccgacgatatcgaacaggttcatggcgaacgcgatcaggttggtgtcgtcgtcctgttcttcaatgctttgtgcaagctgttgggctttttcaccaccgttggagtggatctccagcaggcggtcgcggccctgttctaactgggcttttagcgcttcatgttgctcgcggcaggatttgatcagatcgtcaaacccgtcggtttcttcaggcgcggccagatagttaatcagactggcgtaggctgaatcataaatcgcgcggccggttggacaggtgtgctcaaaggcgtccagcccttcgtgataccagcgaaccagcaccgactgggcggttttttccaggtacgggacgtggatctggatatcatgcgcctggccgatgcgatccagacgaccaatacgctgttccagcagatccgggttaaacggcaagtcgaacatcaccagattgctggcaaactggaagttacgtccttcggagccgatttcggaacataacagcacctgcgcgccggtatcttcttcggcgaaccaggcggcggcgcggtcgcgttcgataatcgacatgccctcatggaacacggcggcgcggatgccttcgcgttcgcgcagcacctgctccagctgtaacgcggtggtcgctttggcgcagatcaccagcactttttgcgaacgatggctggtcagatagcccattagccactcaacgcgtgggtcgaagttccaccaggtgccagtatcgccttcgaactcctgataaatttgttccggatagagcatatcgcgggcgcgatcttccgcgcttttacgcgcgcccataatgccggagaccttaatggcggtctgatactgggtcggcagcggcagttttaccgtatgcagttcacgtttcgggaaccccttgacgccgttacgggtgttgcggaacagaacgcggctggtgccgtggcgatccatcagcatcgacaccagctcatcacgggcggcctgcgcgtcgtcgcgatcgctattagcggcctgcaacagcggttcaatatcctgttcgccgatcagatcgcccagcctgttcagttcgtcgttgctgagtttattgcccgccagcagcatggccaccgcatcggcgacaggacggtagtttttctgttcttcgacaaactgttcgaaatcgtggaaacggttcggatcgagcaggcgcagacgggcgaaatggctttccatccccagctgttctggcgtggcggtcagcagcagcacgcccggcacgcgttcagctaactgttcgatggccatatattcacgactcggcgcatcggtactccacaccagatgatgcgcttcgtcgaccaccagcagatcccactcggcgtcgcacaaatgttccagacgctgcttattacggcgggcgaaatccagcgagcagatcaccagttgttcggtttcaaacgggttatacgcgtcgtgctgcgcttcggtatagcgttcgtcatcgaacagcgcgaagcgcaggttgaaacggcgcagcatttctaccagccactggtgttgcagggtttccggaacaatgatcaatacgcgttccgccgcgccggataataactgttgatgcagaatcatcccggcttcaatggttttacctaagcccacttcatccgccagcagtacgcgtggcgcgtggcgacgacccacatcatgagcgatattaagctgatgcgggatcaggttggtccgctgaccgcgcaggccgctgtacggcatccggtactgctcgctctgaaatttacgggcgcgatagcgcagcgcgaaccgatccattcgatcaatttgaccggcgaacagacgatcctggggcttactgaaaaccaacttgctgtcgagcagaacctcgcgcaacgtcacattggtctcttcggtatccaggcgggtgccgacataaacaagcaggccattttcttcttttacttcatcgatatgtagctgccagccttcatggcttgtaatcgtatcgccagggttgaacatgacgcgggtcacgggagaatcactgcgcgcatacaggcggttttcccccgtggacgggaaaagtaaggtgacggttcgcgcatccatcgcaacaacggttccaagtcccagctcgctttctgtatcgctgatccagcgttgaccaagtgtaaaaggcatatgtgttcggctctatatctttaattgcaggcattactcgccattcccaggcgacagcactggataattgcgagtatacgaccccgctaccaggctaatgtggtagtggcgttaattaggtccaggaatggaaagggcgctatggtactggaaggcggcgctttcgtcacgcgtcaaaatagccccagttgcccggtcagtagtgtagcaaaattatcttcaacgaagggaagaattccttccgccacgggttgtagctggcgggtaagatagtgttcgtaatccagcggcgactgctggtaatccacgggctcggggccgttaacagtccagacatattttatggcgccgcgattctgatactgcgtcggacgaccctgcttcaggttttgttcatccgccagccgggcggcgcgaacgtgcggcggaacgttacgttggtactcatgtaaagggcgacgcagacgcttacgataaaccagctgcgcgtccagttcgcccgccatcagtttatcgatagtctcgcgcacatagtcttgataaggttcattgcgaaaaacgcgcagatacagctcctgttgaaagcgctgcgccagcggcgtccagtcggtccgcaccgtttccagacctttaaataccatgcgctggctgtcgccttcctgaatcaggcccgcgtagcgttttttactgccagtatccgcgccgcggatggtcggcatcagaaaacggcaaaagtgggtttcaaactccagctccagcgcgctggtcaaattttgctgttgtaacgtctgcgcccaccattcgttcacgtgacgcaccagcctgtgcccgatttccgccgcatcggcttctgaatgcgcgcgccggagccagacgaaagtggaatcggtatcgccataaatcacgtcataaccctgcgcctcaatcagcgctttggtctggcgcataatcgcatgaccgcgcatggtgattgacgacgccagacggggatcgaaaaagcgacaggccgtggtgccgagtacgccataaaaggcgttcataatgattttaagcgcctgcgagagcggtttattgccctgacgtttggcttcatcgcgccagtgccagatttggctaacaatttccggcaggcagtgcttttctcgtgaaaaccaggcgtcaaggaaaccttcggtactgtgttccggatccggctgcgccatgccttcgaccagcccgacgggatcaatcaaaaacgtgcggataatcgacgggtacaggcttttataatccagcaccagtactgaatcgtataatccgggttgtgaatccattacgtagccgccgggacttgccagcggcggcacttcgccgagattgggcgcgacatagccggcgcggtgcattcgcggaaagtaaagatgcccgaatgcggcgaccgaaccgccgtggcgatcgaccggcaggccgttgatcgtcgcgcgttccagcaaaaacggcatgatctcggttttatggaaaatgcgcgtgaccagctcgcagtctttcaggttgtaggtggcgagggcgggtttatcctgggcaaagcggcgatcgatctcatccatacgatcccagggattatcaatggattttccttcgccgagcagttcctgcgagacggcttccagcgaaaaagacgaaaaattccagaacgcggatttaagcgcgtcgataccatcgataatgactcgccctctggcctgggcgaaaaaaacgccgtttttgaagccatgttcgcgccactccagttcgctattgtctcgccccagccgtaaagggatacggtagcgttcggcatgtttttgcagcatacgcaggtcgaactgcaccacgttccagccgatgatgacgtcaggatcatgttcggcaaaccaggcgttgagtttttccagcagctgcgggcggctggcgacatacacaagctcgaagtccagttggcggtcatcgccattcgccgggcccagcatataaacggtacgctggccgcagccttccagaccaatgcaatacagttcgccgtgtcgcgtggtttcgatatccagcgagacccattttagcggcggtcgatagtcggggtggggtttaagacgcgcattgcggataacgccgttgcgcatctcgccgtctacccaaacgggcgacgtaataaaacgttccatcaggtaacgttccggcgggcggacatccgcttcataaacggtgacgccgttttcgcgcagcagtttctccatccgcataagctggcggtgagtacggcaatacagaccggagaccggctgacgatgaaagtctcgcagctggagcggcgtcaggcgatagtctttttccgcctgtagcagcgaggcggcgcgggaggtctggctggtcggaataaacgccacggactcttgcggggccagcgtcgcctgcacagggccgttgtctgtcgccagccagaaagagacctccgttccttgcggcgtatcccgccagtgccgggttaaaatgaaacctgcctgcgccacgatgattacctgtctaaaaaattcacgctaattataacctgttttagggggtaatactgttattttgtacaggcatataacgtaaaagccgatatccgctgtaataaaaagtttctcgcagtaagaagcgggtttgcgcccaccaggatttatagcgggtggatcgcgtgggtgatgagcggctatcgataccattatcctgagcgatagttttcagacgcagcatatgcagcggatcgctgaccagtaacgctgtgcgccattgttgttgtcgcagtatctgttttgcgtaacgaatattttcgcgcgtcacggtagagcgctcttcaataaaaatcgccttagccggaatgcctttttccagaacgtattgacgggctatcgccgcgtcggaaaccgttgcgccagcgccgtagccgccggttaataccaacgcgcggacaatgtgttgttggtaaagccagatggcatgatccagtctggcctgaaaaacgggagaaggcgtttttccgctaacgcctgctcctgcgacaatcgcgcagtcagctacgcgcgtctggttttgctgactgaactgataaatagcgatggcattatggataaacaccgtagccataatgagaattatgcctgccgcgattctgatgatgtagcgatatttcatgaatgagttcgttccccgtgacgggtgtaatggatattttaacgataaaatggcttttagcgtcagatatttttgctgacgtatatttatcaatataatgatgccggtatatacagcagatataattatcctataactgctaattttgaatcatgtttatttacagtttttacccatgtattagccgttttgtgtcaagtctgttttcatacattaagtatttttcagaaaggcgcttgttcgaatctgttacttatttctcggattaacaaaaaagcgatattttttgtttgttttacttaatgaaaagtgtaacaatttcatttggaacatccgcaccgtcaggtagaaatataatattccaattggccgctatggttaaataaaaatggattacagtgcgaattcgtcgggaactctctgcataatttaatttttattttagaatataattttattttgactttcgggtgcgggtgtttttatcaaaatttgtggtattcgggaatgatcttttatgaatgtgagtatgcaggcgcgtctggtagggagcgaccgttatcttttcgtcaatactcaacgcgctaacccttccataaaaaccgtgagtcgattttttgagtataaaacatggacagaacagatttggcgcaccgagattattgaaaacggcaatgctttttttcactggcaaggacacgacagaaaaaacggacatcgggataccattattaactatctgttaaatggacaacgctggcagtcaacaatcgaagattatattttcttccatgcgctggaaggaaaagcgtggcagggacattatgataatattattgaatatgtgagttctgatcattacgtctatcaaagcgcatttgctgaatatatcaccgaccagattcatcaacgcgccccccatgggacgcgtttttagaggcattactgcccgtaataggcttttgcgccgtgtttgcgtagatagtgtttatccagcagggattgctgcatgtcgggcaactgcggcgcaagctggcggcagaagatccccatataggccacttcttccagcacgatggcgttatgcacggcatcctcggcatttttaccccaggcaaacgggccgtgcgaatggacaagcacgccgggcatttgagcggcgtcaataccttgtttttcaaaggtttcaacaatgacattgcccgtttcccattcatactcgccattaatttccgcctcggtcattttgcgagtgcagggaatcgtaccgtagaaatagtcggcatgggtggttcccgtcgccggaatcggccgacccgcctgcgcccagatagtcgcgtggcgcgaatgggtgtgtacgatgccgccgatagtcggaaatgcctggtacaacagacggtgggttggcgtatcggacgacggtttcttatgaccttcaacgacttcaccggtctccaggctgaccaccaccatatcgtcagcggtcatgacgctataatcgactccggacggcttaatcaccagtacgccgcgttcgcgattgacggcgctgacgttaccccaggtaagggtgaccaggttgtgttttggcagcgccagattggcttccagtacctggcgtttgagatcttctaacattgttttctccctgccggatggcgcttcgcttatccggcctacgagcgacggtgtgccggatggcgacataaatgccttattcggcctacaggaccgtaggcccggtaaatgaaatgccaccgggcaattcgtttcaccaattaacgtttgaacccgtaatacacctcgttccagcgcagcgcgtccttaaaggctggcagacgggtatcgttatcaatcaccgcgatttcgatatcgtgtatttctgcaaactggcgcatatcgttcagatccagcgcgtggctgaagacggtatggtgcgcgccgccagccagaatccatgcttcggaggcggtcggcagatccggctgcgccttccacagcgcgttagccaccggcagtttcggcagggagtgcggcgtttttacggtgtcaatgcagttgaccagcaggcggtaacgatcgccgaggtcgatcaggctggcgacgatcgccgggccggtttgggtattgaaaatcaaacgcgccggatcttccttgccgccaatgccgaggtgctggacgtcgaggatcggtttctcttccaccgcgatggagggacacacttccagcatgtgcgagccgagcaccagatcgttgcctttctcgaagtggtaggtgtaatcctccataaatgaggtgccgccctgcagaccggttgacattactttcataatgcgaagcagagcggcggttttccagtcgccttcgcccgcaaagccgtagccctgttgcatcagacgctgtacggccagacccggaagttgtttcaggccgtgcaaatcttcaaatgtcgtcgtaaaggcgtggaatccgccctgttccaggaaacgcttcataccgagttcaatgcgcgccgcttcccgcacgttctggcgtttatcgccgtggatccgggtggcgggcgtcagggtatagctgctttcatactcgtcaatcagagcgttgatatcgccgtcactaattgcgttcaccacctgcaccagatcgccgaccgcccaggtattgaccgaaaagccaaatttgatttgcgcggccactttatcaccgtcagtcactgcgacttcacgcatattgtcgccgaagcggcagacttttagctggcgggtatcctgtttagagaccgcctggcgcatccaggcgccgatacgcgtatgggcctctttatcctgccagtggccagtgacgaccgagtgctgctggcgcatccgcgcgccgataaacccgaactcgcggccgccgtgcgcagtctggttcaggttcataaagtccatatcgatgctgtcccacggcagggcggcgttaaattgggtatggaattgcagtagtggtttgttaaggatactcagcccgttgatccacattttggccggggagaaggtgtgcagccagaccaccagccccgcgcagcgatcgtcataattggcgtcacgacaaatggcggtaatctcatccggcgaggtgcccagcggttttaataccagtttacatggcagtttagcttcggtattcagcgcgttgaccacatgctcggcatgttgggtgacctggcgcagggtttctgcgccatacaaatgctggctgccaatcacaaaccatacttcataattatcaaaaatcgtcattgtcgtgtccttaatgagtcaggattgcctgattggccggggtcgttggcgccggcgcggcagtcggaagataatgttgttctgcgcttagcgcccactgctggtagcggcggtaaagccgttcgaagcgttgcgcctgttcagggcggggacgcagagtgcgttctaccgcgctcgccatgctttgctgggcggcaggaatatcggcatggactttcgcggcaacggcggcaaagatagcggcgcctaatgcgcaacactggtcggaagcgacgatctgcaacggacgattcagtacgtcgcagcagacctgcataatgacctgatttttacgggcgatgccgccaagcgccatcacgttattgaccgcgataccctgctcggtaaaacactcctgaatggcgcgcgcgccgaaggcggtcgaggcgaccagaccgccaaacagcgctggcgcgtcggtggcgagattgagatcggtaatgacgcctttcagacgctgattagcgtttggcgtgcggcgaccgttaaaccagtcgagcaccaccggcaggtgatccagggacggatttttcgcccaggcgtcggtgagcgctggcagtagctgcttctggctggcgttaatctgggttttcagttccgggtgctgcgcggcaagttgttccagcggccagctcaacacgcggctaaaccaggcgtagatgtcgccgaaagcagattgccccgcttccagaccgataaagttcggcaccacgctgccgtcaacctgaccgcaaatgcctttcacggcgcgatccccgacgctctgtttatccgcaatcagaatgtcgcaggtagacgtgccgatgacttttaccagcgtattggactgtgcgcccgcgccgaccgcgcccatgtggcagtcgaacgcgccgccggaaatcactacgctttccggcaagtcgaggcgctgcgcccattcggcgcacagggtgcccacgggcagatcggcggtgaaggtttcgctaaataacgggtagtgcagatgacggttaatgcacggatcgagttcatcaaagaagctcgcgggcggcagaccgccccagcttgcatgccacagtgttttgtgcccggcgctgcagcggccacggcggatatcttgcgggcgagtggtgccggaaagcagcgccggcacccagtcacacagttcaatccacgagacggcggcctgcgcgacggcgctatcctggcgggtgacgtgcagaatcttcgcccagaaccattcgctggagtaaatgccgccaatatagcgggagtagtcgaccttacctggcttatggcacagacgagtgatttcgtcggcctcttccaccgcggtgtgatctttccacagcacaaacatcgcattcgggttctcggcgaactccggacgcagcgccaggacgttaccgtcggcgtcaatcggcgctggcgtagaaccggtgctgtcaacgccaatgccaacgacatttgcgcgttgcgcggcgcttaattgtgccagaacggctttcagcgcggcctccattgactccatgtagtcgcgcggatgatgacggaactggttgttcgggccgtcgcaataacggccttcttgccagcgtggataccactctacgctggtggcgatctcgtcgccggtggcgcagtccactgccagagcgcgcactgaatcactgccaaaatcgaggccaattgcaattgccatcgtcttactccatccagaaaaacaggtatggagaaacagtagagagtcgcggcaaaaaccgtcaggcaggatccgctaatcttatggacaaaaatgctaatgctttgcaaagtgtgacgctgtgcaaatattcaatgtggacattccagccatagttatagacacttctgttacttaattttatcgcctgaactgtacgcttttgttacaaaacgcttttcacaagcggggttgatacgtgctttcatcaagcgcaaggtcttgcggagacggaagctctgtcgtcctggtcaatatggacaatttgtttcttctctgaacatcgggggtagagaaatcatggctgaaacgcaaaatgatccgctattgccgggatattcatttaatgcccatctggtcgccgggctgacgccaattgaagcgaatggatatctggatttttttatcgatcgtccgttgggcatgaagggatatattcttaacctgaccatccgcggagagggcgtcattaataataatggcgagcagtttgtctgtcggcctggagatatattattgtttccgccgggcgagattcatcactatggacggcatccggacgccagcgagtggtatcaccagtgggtttatttccggcctcgcgcctactggcaggagtggctgacctggccgacaatctttgcccagacaggatttttccgcccggacgaggcgcgccagccgcatttcagcgaactgttcgggcagatcatcagcgccgggcaaggggaaggccgctattctgagctactggcgatcaatctgctggagcagttgttgctcagacgtatggcggtaattaatgagtcgttgcatccgccgatggatagccgtgtgcgcgatgcctgccagtatatcagcgaccatctggcggacagccattttgatatcgccagcgtcgcccagcatgtctgcctgtcgccctcccggttatcgcatctgttccgccagcagttaggcattagcgtattgagttggcgcgaagatcagcgtatcagccaggcgaaactcctgcttagcaccacgcgaatgccgatagcgaccgttgggcgcaatgttggatttgacgatcagctctatttttcgcgggtatttaaaaaatgcaccggggcaagtcctagcgagttcagggccggatgtgaataaaaagtgaatgatgtgtccacaaagatgtcataagccgtaactattcggataattgacggcttgacgaagggggacggggtaagcagaatccctgcttcatcacgctgacggacacactatgcaagcactgctggaacattttatcacccaatccactctgtattcgcttatcgccgtgttgctggtcgccttcctggaatcgctggcgctggtggggttgattttacccggcacggtactgatggcggggctgggcgcgcttatcggcagcggcgagctcaatttttggcatgcctggctggtgggtattatcggctgtctgatgggcgactggatttcgttctggctggggtggcgctttaaaaagccgctacaccgctggtcttttatgaaaaaaaacaagtcgctgctggataaaaccgaacacgcgctgcatcagcacagtatgttcacgatcctggtcggacgttttgtcggtccgacgaggccgctggtgccgatggtggcagggatgctggatcttcccgtggcgaaatttattgggccaaacttgattggctgtttgctgtggccaccgttttatttcctgccgggcattctggcgggagcggcaatcgatattccttctgatatgcagagcggagatttcaaatggctgctgctggctacggcgttgctgctgtgggtcggaggctggctatgctggcggctgtggcgcagcggcaaagcggcagtcgatcgtttaaccgcgtatctcccccgcagccgtttgctgtatctggcgccgttgacgctcgggagcggcgtggtcgcgctggtggtgctgattcgccacccgctgatgccggtatatatcgatattctgcgcaaagttgtgggttactaacgattcctttgccggatggcggcttcgccttatccggcctacaaaagatgggatttgatgcccaatagcgctgaggcgctggcctgaccgcttagtagctcgtctgttttgccttgccacgcaatgcgtccgtcggccacgacgattgaccggggcgcaattcgcgccgcatcttccacgctgtgcgagaccatcaacagcgtgagctgtcgctcgcggcagatatcgctgaccaacgtcagcatctcctggcgcagcgcgggatcgagcgcggagaacggttcatccagcagcagtaccggctgttcacgtaccaggcagcgcgccagcgctacccgctgacgctggccgccggacagttcgcccggtaaacgcgtcatcagactctcaatgcccatctgatgtgcgatagcgtcccgtttttcccgctggctggcgttgagcgttaacccagggtttagccccagaccgatattttgctgcacattcaggtggctgaataaattattctcctgaaacagcattgagaccggacggcgtgagggcggcgtaagcgtatgatcgtcgccggcaatcagtagcgtaccgctggcaggcgcaagaaaaccggcaattaaattcaacaacgtgcttttccccgcgccgctggggccaagaatcgccacctgctcgccgcgttctaccgccagcgtaaaacgcatcggcaaatgatggtaaagccaggtgatatcaatcagttttagcatgtcggcccggtagtttctctatgagggtaaataacgtaaagcagagcagcagcagtatcagcgcggtcaccgcgccgtcctggctgcggtaggagccgatctgctgatacagataaaacggcagcgtgcggaaattgtcattgccgaaaagcgcgacgacgccaaaatcaccgatagaaagtacgcaggcaaacgccagcgcctgcgccagcggacgtttcagcgcccgcagttccacgacctttaaccgcgaccagccttcaattcctaatgactggcacagcattccataacgggcggtaatatcgcgcattgggttttccaggacttttagcgcgtaggggattgccatcagcgcattggtgaaaatcacgatgccgtcggcggattccggtaagccaacgctgctattgagcagtaaaaagaagcctgtcgccagcacgatccccggcatcgcgaggatcaacatcccgctgagttccagcgtttgtccggcgaagacttgctggcgttggcgtagctcgcggctactccacagtagcatcatggtcagcaccacacacagaacgcccgccgccagcgcaatgcgtagcgatgtccagacagcctgccacagaatgggttgcgccagcacctccggcaggctgcggttgacgccatcgaccaccacggcgaccagcggcggaagcagcagcagcagcgccagcacgattaataaggcgtccgtcagacggctgtggagacgatcgtcaggatcgcgccaaccctgcgtcagcgtcatccccggcgcaatcgctttgctcagccgttggcttagcagtaccagcgccaggcagcagaccatctggattaatgccagcatcgccgcgcgggcgggatcgtagtcataactaagcgcctgaaagatagccagttcgatagtggtggcctgcgggccgccgccgagcgacagaaccgttgcgaaactggcgaagcagagcataaaaatcagcgccgcgacgggcggaatttggcggcgcagccacggccattcgacaaaacggaaaaaatgccagccgcgcataccgagctgggcggcgagctggcgctgctcgccgggaatgctttccaaagattgcagcaacaaacggctcgccattggcaggttaaaaaagacgtgcgccagtaaaatgccctgcaagccgtagggggagaatgtccactgaagccccagcatctgccacagcgaggccagccagccctgacggccatacacgctaagaataccgaacacggcaaccagtaccggcagaatcagcgtcatggcgcacagacgcagcagcgccagacgtccaggaaaacggcgtcgataaagcgcgcgggcgagaaaaaccgccgggaccacagacagcactgcggacagaaacgcctgccagaatgagaagcgcaccacatgccacaggtagctatcccgccagattgtcgaccacgcgcccgacggcgcgttcagccaaagcgccagaaaggccgccagcgagacggttatcatcagcgcggcggcgcacagccccggaatcagccagccgggaattaacggctgacggcgcgttgccattcgctaatccatgcctggcgttgtgctgccacttgttgcggcgtgaattccagcgttgtggcgggtttggccaatgattcaaaccctgctggtaaggcgacgtccgctaccgggtacatccagttgccggtgggtatggcgttctgaaacgccggagaaaccataaatttgaggaatttctccgccagttccggctgcttactggcgacggtacgcgccgcgacttctacctgtaagtaatggccttcgctgaagttcgcggcggcgtaattgtccttcttctcttcaataatgtgatacgccggagaggtggtgtaactgagcaccaaatcgctttcacctttcagaaataagccgtaggcctcgctccagcctttcgtcaccgtcaccgttttggccgccagtttttgccaggcctgcggcgcgttatcgccatagactttgcgcatccacagtaacagccccagccctggcgtactggtacgcgggtcctgataaattacccgccatttttgatcgctctcgaccagttctttcaggcttttcggcggatttttcagcttgcttttatcgtagacaaaggcgaaatagccgtaatcgaacggcacaaatgtgtcgtttttccagccgccgggcaccttgaccgcctcattcgccacgccgcttttggcaaagagtttagtttgcgtggccgcttccagcagattattgtccagccccaacaccacatcggctttgctgttcttcccctccatccgcaggcggttgagcagcgaaacgccatcctccagcgccaccagtttcagctcgcagttgcaatcggcttcaaacgcttttttcaccgccgggcctggcccccagtcggcggcgaacgagtcgtaggtatagacggtgagaacgggtttggcgaaagcaggcgccgcgcacaggagtaaaagcggaagatatttttttaacactttgcacctcagttaaagagtggcaaaggacttgagaggtagcctcaaatcccttcgccggcattatccggatcaggttcgacgggtattttctcagcgcgcgcatgagcgcggcaccccgttgagttcggcgttagtgtagtgattttgttgccgggcagcaatcaagagctggcgttaaggatctggcggcgcaaaccacgccgatttaaaatcaaaccagccgagggtattcatgcgcagcccgcgcatactgcgttgtccctggataatcagccagtggtggatcaacggcacaatcgctttgttggccagcagttgctggcaccagttcgccaggttcatctcgccagcgcgccactgcgcggcgtcgtcctgccagtcgcgcggaatgcagttctgcaagagcggtacttcgcacaagtgcgcgaacagcgagaaatccagcggcagcgtaaagttagcgctattgagccagatatcgctttcgatgtcgccggcgtgccattgatcgtagtcgatctcctgaatatgcagatgcacctgatgttcagccagaagcgcgctcatgatacgggcgataacccggtgctcaatgtgttcgcgatagaaggtcagcgtgagggtttccagcccggcgggtttttcgcccgggcctggacgggcgtgatgccagcgcggtaaaagcccataggccgggaaccagagctgctgtagcggttcatcggcatgatagagtaaattggtgggggagaggacgtggcttacccattctctgacctgcagatgcgcgccgcgcggcgttctggcgtcgaatagcaggtaatagcacccctcttccagtcggctttctatcgctttttcaccgccttgtatcggcccttccagcatcaagccgcaggccggttcttcactgatatccggcagtacccagacattcacttcgtctatcaacgcccgatagccgaagtaatcatcaaaggcgagtatcttgagctggtttggcgtattacgccgcacggcataaggcccggtgccgatagggtggctggcgaaattagccagcgtttcccactcccgcggcaaaatcatcgccgggacctggcccagcagccacggcaaccagcgatccggctgggaaagatgaatatccagcgtccacgcggtaggggagtctatctttgtgatgtgcgagtaaagcggaagcgtattgatacgcgtcagcgaggtgatgacatcttccatctccagctcgcggccatgatgaaaatgaatgccggggcgcaggtagaagcgccacagtaaaggggaaatttgctgccagtggtgcgcaatgtccgcttccagttccccgttttcctcatttacccgcgtgagcgaactgaaaatttgccgggcaatatgagtttccgagcgacgtaatgcggttcccggcaggagattgtgcatcggacgatagtaaagaacccgcagaatatgccgcccctggcggaagctgcgtcccagatgggaaatcagcatttgcctgacagcgcttttatcgccgaccagttgtaccagttgatcgattcgatcttgttccagcaggtcttccgcccgctgctgttgcagcgccagtccggtatacaggaacgtcagacgcgaacgctttccgcgtccaacctcagcttcccatgttagccaaccgcgcgcctgcatcgtatttagcagcgtacgcatatggcgacgcgaacagttcagcagatccgccagctcattaagcgtggtgtcttgcgttttaccgtcacaacattgccagagacggataaattgttgttgcaggcgacctgagggcataaaaggggaactccgatgaaaaactcagcaattttattatccctatattaggccaataatatctttcgatgaagcaagaggaagaggtcactatgcgccagttctggttgagatattttgccgcgacggaaaaaacgtcctggctggcttgcctgagcgcgccgcagcgcttaaaaatgctcgcggaactgatgcagtgggaggcgaccgattgaagccaattgcagacatcatgtgtgactgagtattggtgtaggcgatagcctaaaatcacccgccagcagataatatctgctggctttttttatttcggctgtttctggatgacgacgatgggacggcgtctcaacgggatttatacggcggtttctgtggtcacgcaggtgatgaccgggcgagtaaaagacgtgtaatgttgcgtgacaagcgccattttgcatggtactgaaacagacttttttttatttttatcatcgctaatcttatacgcgttatcgcatggtgctttaacgtgtttagtacaaaggaatgataatgaaaaaggtttttttgcttgcagcgctttttgctatgtccaattcctctttcgcggcaatggctgaaagttgtcagcaatattttaatgatattgatgccctggttgagcaggctgcagcaacgagtgaacaggcaaaacagcaatttgacgcgatgaagcctcaactcgaagcgtcaaaaaaacagttggaaactgtagctgcatctgaccaggatgctgcgtgtaagcaggctctggcgtcaatggttcagattaaacaggctctgggattaaaataagatagataccagcaataagcgatgagtatcgcttattgctggtcgttttggtatcaacgcataaactcaggctgcttgtcttcgtactcggcaatcgcgtcttcgtgctgcagcgtcagcccaatgctgtccagaccgttcaacatgcagtggcggcggaagtcgtcgattttaaagctgtaggtcttatcgcctgctttcaccacctgtgcttccagatccacttcaaatttaatgcccggattggctttcaccagagcaaacagctcatcgacctgtgcgtcgctcagggttaccggcagcagttggttgttaaagctgttgccgtagaagatgtcggcgaagcttggcgcgatcaccactttaaagccgtaatcggtcaacgcccacggcgcgtgttcgcgtgacgagccgcagccaaagttttcccgcgccaacagaatcgacgcgccttgatattccggaaagttcaacacgaattccggatttggctgttggcccttttcgtccaggaagcgccagtcgttaaacagatgggcgccaaaaccggtgcgcgtaaccttctgcaaaaactgtttagggagaattgcatcggtatcgacgttggcggcatccagtgggacaaccaggccggtatgctgggtaaatttctctgccatggtagtttccttatttgatgctgcgaatgtcggcgaagtggccggtaacggcggcagcggcggccatcgccgggctgactaaatgcgtgcgaccccctcggccctgacggccttcaaagttacggttgctggtggaggcgcagcgctcgcccgggttcaggcggtcattattcatggccaggcacatggaacagcccggtaagcgccattcaaatcctgcttcgataaagatcttgtccagaccttccgcttccgcctgcgctttcaccggacctgaacccggcaccaccagcgcctgcacgccaggcgcaactttgcgccctttggcgacttccgccgccgcgcgcaaatcttcaatacgcgaattggtacaagagccgataaagactttatcaatagcaacgtccgttaacggtacgcccggctgtaagcccatataagccagcgctttttcggcgctggcgcgctcaaccggatcgctaaaagaggcgggatcggggatgatgtcggtgacggaaatcacctggcccggattcgtgccccaggtcacctgcggcgcgatctcttctgctcgcagggtgacgacagtatcaaaggtcgcgccgtcatcggttttcagcgttttccagtactcgacggcttcgtcaaaatcgcggcccttcggcgcgtgcaaacgcccttttacgtagttaaaagtggtttcatccggggcgaccagaccggctttggcgcccatctcaatcgccatattgcacagcgtcatgcggccttccatactcagcgcgcggatcgcgtcgccgcaaaattcaaccacgtgcccggtgccgccggcgctgccggttttaccgatgatcgccagcacgatgtctttggcggtaatgcccggcgcggcgttgcccgtgacttcaatcttcatggttttagcgcgcccctgtttcagggtttgcgtcgccagtacatgttctacctcagaagtgccgatgccgaaggccagcgcgccaaacgcgccgtgggtggcggtgtgggagtcgccgcagacgatggtcatgcccggcagggtgacgccctgttccggccccatcacatggacgatgccctgatatgggtgattcaggtcatacagctcgacgccgaactcgttacagttcttaatcagctcctgcatctggatacgcgccatttcaccggaagcattaatgtctttagtctgcgtcgagacgttgtgatccatcgtggcgaaggttttccctggctgacgtaccggacgatggtgcgcgcgcagaccgtcaaacgcctgcggagaggtgacttcatgcaccaggtggcggtcgatgtacagcagcggcgtttcgtttggcgcctcaaagaccacgtgggcatcaaataatttttcgtataacgttttggccatgattacaccccttctgcgacatagcgggcgataatatcgcccatctcatcggtactgactgcggcagcgcccctggctaaatcgccggtgcgaacgccctcttctaatgcgcgattgatcgcctgttcaatggctgttgccgcatcgttggcatccaggctgtagcgcagcagcagcgccagcgacaggatctgcgcaattggattggcgatatttttcccggcgatatccggcgcggagccgccagccggttcatacaggccaaacccttgctcgttcaggctggcggagggcaacatccccattgagccggtgatcatggcgcattcgtcggacagaatgtcgccgaacaggttagagcacagcagtacgtcaaactgcgacgggtctttaatcaactgcatggtggcgttatcgatatacatgtgcgcgagttccacatcgggatacgttttcgcgacatcattgacgatttcacgccacaggatagagctttgcagtacgttggctttatcaatagaggtgactttacggcggcgtttacgcgccgattcaaaggcgatacgggcaatgcgctcgatctcaaagcggtgataaacttcggtatcaaaggctttttcgtactgaccgctgccttcgcggccttttggctgtccgaaatagatcccgccggtcagctcgcgcacgcacaggatatcgaaaccgttagcggcgatatcggcgcgcaacgggcaaaatgcttccagtccctgatacagtttcgccggacgcaggttactgaataatttgaaatgtttgcgcagcggcagcagggcgccgcgctctggctggctttccgggggcaaattttcccatttcgggccgccgacggagccaaacagaatggcatccgcctgctcgcacccttcaacggtggttttcggcagtggatgaccatgattgtcgatagcaataccgccgacgtcatagtggctggtggttatacgcatatcaaaacggctgcgtaccgcatccataactttcagggcttgcgccatgacttccgggccgataccgtcgcccggcagtacggcaatatgatagttcttcgacattacacggtttccttgttgttctctttattttgagctttgcgttgcaattctttttcaacttcggcggcgcgccagatattgttcagtacgtgcaccatcgctttggcggaggattcgacgatatccgtcgccagcccgacgccgtggaagcggcgaccatgatggttcacgacgatatcgacctgacccagcgcgtctttgccctggcctttggcgttcaggtcgtatttaaccaactcaacgtcgtagccagtgatgcggttaatcgcctgatagatggcgtcgaccgggccgttgccgttcgccgcttcggccttgatctcttcaccacaggccagcttcacggaagcagtggcgatatcgctggagccggactgcacgctgaagtaatccagacggaaatgctctggttcttcttgctgtttattaataaacgccagcgcttccaggtcatagtcgaacacctggccttttttgtccgccagcttcaggaacgcgtcgtacaggtgatccatgttgtagtctgtgtccttgtaacccatctcttccatgcgatgtttcacggcggcacggccagagcgggaggtcaggttcagctgtatctggttcagaccgatggactctggcgtcatgatttcatagttttcgcggttcttgaggacaccatcctggtggatgccggaagagtgggcaaaagcgccgctgccgacaatcgctttgttggccgggatcggcatgttacagatctggctgacggtctggctggtgcgccagatttcgtggtgattgatgttggtgtgtacattcatgatgtctttgcgcactttaatcgccatgatcacttcttccagtgcgcagttaccggcacgttctccgataccgttcatcgcgccttcaacctgacgcgcgcccgcatgtactgccgccagcgagttgcctactgctatccctaaatcgtcgtgggtatgaacggagatgatagctttgtcgatattggggacacgttcatacaggccggaaatgattcccgcgaactcaaacggcatggtatagcccacggtatcgggaatattaatggttctcgcgccggcgtttatagcggcttccaccacgcgcgccagatcgtcaacaggcgtccggccagcatcttcgcaggagaactctacgtcatcagtgtaattacgcgcccgcttaaccatgtataccgcgcgttcgatgacctcatccagcgtgctgcgcagtttggtggcgatgtgcattggcgaggtggcgataaaagtatggatgcgaaacgcgtcggcgaccttcagcgcctgtgccgcgacgtcaatgtctttttctacacaacgcgccagggcgcaaacgcggctgtttttaatggtgcgggcgatggtttggacggattcaaaatcacccggagaagagaccgggaagcccacttccatgacatcaacacccatgcgctcaagggccagggcaatctgcagcttctctttcgcgctcaggctggcctgtaacgcttgttcgccgtcgcgtaaggtcgtatcaaaaataatgacttgctggctcatgatgtggtccttgtctccaggggcgccttgcgtcaggcataaaaaaacccgcgcaacggcgcgggttttgtttgacttcgagctgacttaatgttgaatgccgcccaccggtctaccgcgcacaataaatgcgttgagtagtagtagcccagtgaaacgaacgatatgtgacattaattcagctccagcgaatgcgttatgcttttagtggtactggatatgccgtttaatgtcaactctattttctgtcgccattgcattttgttgacgatatccggatacgtactttagctaattgtgctgggctgcgcgtccaataaaggataaaagaacgagtggacattcatacttttcattgtttgaaatatttaggcatttttgtttgcaaattggttaggggaatggcctgttaaaggtatgctaaaggttttgtttatctttttgatttgttttatattttaacaaataaccttgtttacttaatggataaggataaagttattgataaattaatgttaactttttagctattaataatataaacatttaattgaaacttaaatgatcattcacttggtgtatgattgtgtattcgccatagttatggttatattgcttgcgtaatttaaacattatgaatcgcaatggtgtgactcaggacacattatgcttgcgctggcattctatttgtctctgtcagcgtctttatgttttccgaattttaacgctttccctttttcttattttatatgcatggtaaatcatattttcaggaattatttctgccttcagccagaaaaagggagttaagcgtgacagtggagttaaatatgccagaggtcaaaaccgaaaagccgcatcttttagatatgggcaaaccacagcttcgcatggttgatttgaacctattgaccgtgttcgatgcggtaatgcaagagcagaatattacgcgcgccgcccacacgctgggaatgtcgcagcctgcggtcagtaacgccgtagcgcgtctgaaggttatgtttaatgacgaactttttgttcgatatggacgaggaattcagccgactgcccgtgcatttcagttatttggttcagtccgtcaggcgttacaattggtgcaaaatgaattgccgggatcggggtttgagccgaccagcagcgaacgtgtattcaatctttgcgtgtgcagtccgctggataatatcctgacgtcacagatttataatcgtgtagaaaaaattgcgccaaatattcatgtcgtttttaaagcgtcgttgaatcagaatactgagcatcagttacgctatcaggaaaccgagttcgttattagttatgaagaattccgtcgtcctgagtttaccagcgtaccgctatttaaagatgaaatggttttagtcgccagccgaaaacacccgcgtattagcggcccgctactggaaggcgatgtttataatgaacaacatgcggttgtttctctcgatcgttatgcgtcatttagtcagccgtggtatgacacgccggataaacagtcgagcgtggcttatcagggcatggtgcttatcagcgttctgaacgtggtttcgcagacgcatttggtcgctattgccccgcgctggctggcggaagagtttgcggaatcgctggatctgcaaatattgccgttgcctttaaaactgaatagccggacatgctacctttcctggcatgaagcggctgggcgtgataaagggcaccaatggatggaagatttattagtttctgtttgtaagcgataaaaccgggcagaataaatcagaaacaaattctggtttattctgctttttagcgtatataaaaaattttatgctgaattaacggtgagcgattcttttcgtcgttgtgaaaaatagatgaattgctgtaagtctgcatttataagcgattatttattacctggtgtgattcagacggagtatttctccatttcttctcttcttgcctcctgattattctaaccttccccatctttacgtcattccacccaattgccaggcgtgatagcgagcggttaaggtgtccgtcaaaccgtgatgacaggtataaagtggaggcaagccgtggagatgttgtctggagccgagatggtcgtccgatcgcttatcgatcaaggcgtaaagcaggtgttcggctatcctggaggcgcagtgcttgatatttatgatgcgctacataccgttggagggatcgatcatgtgctggtgcgtcatgagcaggccgcggtgcatatggcggatggcctggcgcgagccactggcgacgttggcgtggtgctggtgacttccggaccgggagcgaccaatgcgattaccgggattgctacggcctatatggattccattccgctggtgattctttccggccaggtcgccacctcattgattggctatgatgcttttcaggagtgcgacatggtggggatttcccgaccggtggtcaaacatagcttcctggtcaaacagacggaagatattcccctggtgcttaaaaaggccttctggctggcggcaagcggacgtcctgggccggtggtcgtggatttgccgaaagatattttgaatccggcgaaaaaaatgccgtatgcctggccggagacggtcagtatgcgctcttacaatcccacaacatcaggacataaaggacaaattaagcgtgccttgcaaacgctggcgtcggcaaaaaagccggtggtctacgttgggggaggggcgataagcgcggcctgctatgcgccgttgcgccacatcattgaaacctttaacctgccggtggtctcttcattaatgggactgggcgtgtttcctgctactcatcgccagtcgttaggaatgctgggaatgcatggcacttatgaagccaatatgaccatgcataacgccgacgtgattttcgctgttggcgtacgatttgacgaccgcacgacgaataatctcgctaaatattgtccgaacgcgacggtattacacatcgacattgacccgacgtccatatccaaaacggttaacgctgatatcccggtggtgggcgatgcccgcctggtactggaacaaatgctggagctactggcgcaggatgcgccgtctcagccgcaggatgatattcgcgactggtggcagcagatagagagctggcgcgcccgtcagtgcctgaaatatgacgcggaaagcgaaagcattaaaccccaggcggtgattgaaaccctctggcgtctgacgaagggcgatgcgtacgtgacgtccgatgtaggacaacaccagatgtttgccgctctctattacccgttcgataagccacgtcgctggattaattccggcgggctcggcacgatgggttttggcctaccggctgcattgggcgttaaaatggccctgccgaaagaaatggtggtctgcgtgaccggcgatggcagtatacagatgaacattcaggagctgtcgacagccttacagtatgaactgccggtactggttctgaacctgaacaaccgttatctggggatggtaaaacagtggcaggatatgatctattccggtcgccattctcagtcttatatgcagtcgttaccggattttgtgcgcctggcggaagcatatggccatgtcgggctgcagattaaccacccggatgagctggaaagtaaactcagcgaagcccttgagcatgtgcgtaataaccgactggtgttcgtcgatgtcaccgttgatggcagcgagcatgtctatccgatgcagattcgcgggggcgggatggacgaaatgtggttaagcaaaacggagaggacctgatgatgcgccggattttatcggtattactggaaaacgaatctggggcgttatcgcgggttatcggcctcttttcgcaacgcggatataatattgaaagcctgaccgtcgcgccgacagacgatccgacgttgtcgcgcatgactatccagacggtaggcgatgaaaaagtgcttgagcaaattgaaaagcaactgcacaagctggttgatgtgctgcgcgtcagcgagctgggacagggagcgcacgttgagcgggaaatcatgctggtgaaaatccaggccagcggctacggacgggaagaggtgaagcgtaatacggaaattttccgtggtcagattattgatgtcacgccaacgctgtataccgttcaactggcgggcaccagcgataaactggatgcttttctggcctcgctgcgcgacgtggcgaaaattgttgaagtggcgcgttcaggcgtcgtcgggctttcgcgcggcgataagattatgcgctgagcagattcgccggatgacgacgcggttgcgttttatccggtctacaggctgatatctggcccaggtccgataagcgtagcgccatcaggcaggtttgccggatatcagccaacaggaattatcgcccaacccaatatcaccggttgggcttttttttgcgaaatccgtggtaacccggaataaaagcggttgccggagtgatcaaactgcgcttagatgttaacgattttaacccatgccgacataaaggttatggtttgtacaatttacacaaggggcaattgtgaaactggatgaaatcgctcggctggccggtgtctcgcgcacaactgcaagctacgttataaacggtaaagcaaagcaataccgcgtgagcgacaaaaccgtagaaaaagtcatggcggtagtgcgtgagcacaattaccatcctaacgctgtggctgccgggctgcgtgctggacgcacacgttccattggtctggtgatcccggaccttgaaaacacgagctacacccgtatcgcaaactatcttgagcgccaggcacgccagcgtggctaccaactgctgatcgcctgttctgaagatcagccggataacgaaatgcgctgcattgagcaccttttgcaacgccaggtggatgcaatcattgtttcaacttcgttaccgccggagcatcccttctatcagcgctgggccaacgatccgttccccatcgtcgcgctcgaccgcgcgctggatcgcgaacatttcaccagcgtggtcggtgccgatcaggatgatgccgagatgttggcggaagagctgcgtaaattcccggcggaaacggtgctttatttgggcgcgctgccggagttgtccgtcagtttcctgcgcgagcaggggttccgcaccgcatggaaagacgatccgcgggaggtgaatttcttatatgccaacagctatgagcgcgaagccgccgcgcagctgtttgagaaatggctggaaacgcatcctatgccgcaggcgctctttacgacatcattcgcgctattacagggcgtgatggacgttacgctgcggcgcgatggaaaactgccttcggatttggcgattgcgaccttcggcgatcatgagctgctggattttctgcaatgcccggtactggcggtggcgcagcgtcatcgtgatgtcgcggaacgcgtgctggagattgtgctggcaagtcttgatgaaccgcgtaaaccgaaacccggcttaacgcgtattcggcgaaacctgtatcgtcgcggcattctgagccgtagctaaaggaccggcggtaaaagacactctcttctgccgccgtcaaacaaatgcgtatcagtaaaaatatcccttaaataattaagactattccttaaaattatccgaaaattcttttttattacctttcttttgtccgaaatcgtccatattccactaattaagacgtaacgagtcttttcctttgtcttgttttgttacaagcaggcaagaaatcgtcgaattaacagccactttttgtctttggcgcgacagtcgctcgtaggcgctggtatagcaggcgctgcacacgttaaacaggcactgttaacacggtgcaatatgtcctaaaatgccgctcgcgtcgcaaactgacactttatatttttctcggattatattgagtccgttttaaacggcggtgggtctttggtttttttcttacaaatattcataacgttaatttgacttgcacgctgggtggaaattaatcaacgcagatattcgccgtaaacattggcttttttacttaggtaagcgttgtgacttgcttgacaagcttttcctccgctccgtaaactccttcgagtgggaatttgtgggataaagtggtaagaaggggtgagactggcatgttccggggggcaacgttagtcaatctcgacagtaaagggcgcctgaccgtgccgacccgttatcgggagcaactgatcgagagcgctaccggtcaaatggtatgtaccattgacatccatcacccatgcctgctgctttaccccctgcctgaatgggaaattattgagcaaaagttatctcgtctgtcgagcatgaacccggtagaacgtcgcgtacagcgtttactgttgggccatgccagcgaatgtcagatggatggtgcaggtcgattactgatcgcgccagttctgcggcaacatgccggactgacgaaagaagtgatgctggttggacagttcaacaaatttgagctgtgggatgaaacgacctggtatcaacaggtcaaggaagatatcgacgctgaacagtcagctaccgaaacgttatcggagcggctgcaggacttgtctctataagatgatggaaaattttaaacacactacggtactgttggatgaagccgttaatgggctgaatattcgtccggatggtatctatattgatggcacatttggtcgcggcggccactcgcgcctgatcctctcgcaactgggcgaagaggggcgcttgctggcgatcgatcgcgatccgcaggcgatcgccgttgcgcagaccattaatgatcctcgcttctccatcattcatggacctttttccgcgctggctgattatgtagccgagcgcgagcttaccggcaagattgacgggatccttctcgatcttggcgtatcttctccgcagcttgacgatgcggagcgcggtttttcatttatgcgcgacggtccgctggatatgcgaatggacccgacgcgcggccagtctgccgccgagtggttacaaacggcggaggaggcggatatcgcctgggtgctgaaaacattcggcgaggagcgttttgccaaacgtattgctcgcgccattgttgagcgcaatcgcgaacagccgatgacccgcaccaaagagctggcggaggtggttgcggcggcgaccccggtaaaagacaaattcaaacatcccgcgacccgtaccttccaggcggtgcgcatctgggtaaacagtgaactggaggagatagagcaggcgctaaaaagctcgctcagcgtactggctccaggcgggcggctttcaatcatcagtttccactcgctggaagaccgtattgtgaaacgctttatgcgtgagcaaagccgcggtccgcaggtaccggcgggattaccgatgacggaagcgcagctcaaaaaactgggcggtcgtgagttacgagcgttaggcaagttgatgccgggtgaaaaagaggtagctgaaaatcctcgggcccgtagttcagttctgcgtatcgcagagaggacgaacgcatgatcagcagagtgacagaagccctaagcaaagtgaagggatcgataggaagcaacgagcgccatgccttgcctggcgtgatcggtgacgatcttttgcggttcgggaagctgccactctgcttgttcatttgcatcattttaacggcggtgacggtggtcacgacggcgcaccatactcgtttactcaccgcgcagcgtgaacaattggttctggagcgcgatgcattggacattgaatggcgcaacctgatccttgaagaaaatgcgctaggcgatcacagccgggtggagcggatcgcaacggaaaagctgcaaatgcagcatgttgatccgtcccaagaaaatatcgtagtgcaaaaataaggataaacgcgacgcatgaaagcagcggcaaaaacgcaaaaatcgaaacgccaggaagaacagaccaacttcatcagttggcgttttgcgttgctgtgcggctgtattttactggcgctggtttttttacttggacgcgcggcgtggctacagattatcgccccggatatgctggtgcgtcagggcgatatgcgttcgctgcgtgttcaggaagtctccacctcacgcggtatgattaccgaccgttccgggcgtccactggcggtcagcgtaccggttaaggcgatctgggccgacccgaaagaagttcatgacgccggcggcatcagcgttggcgatcgctggaaagcgctttctactgcgctcaatattccgctcgatcagctctccgcccgtatcaacgccaacccgaaagggcgttttatttatctggcgcgccaggtaaatcctgacatggcggactacatcaaaaaactcaaactgccggggattcatttgcgtgaagagtcccgccgctactacccgtcaggagaagtaaccgctcacctcatcggttttaccaacgtcgacagtcagggtattgaaggcgttgaaaagagctttgataagtggcttaccggtcagcctggcgagcgaatcgtgcgtaaagaccgctatggccgcgtgattgaagatatctcctccactgatagtcaggcagcgcacaacctggcgttaagcattgatgaacgcttacaggcgctggtttaccgcgaactgaacaacgcggtggcgtttaacaaggcggaatccggtagcgcggtgctggtcgatgtcaataccggtgaagtactggcgatggcgaatagcccttcctataaccccaacaaccttgccggtacgccgaaagacgcgatgcgtaaccgtaccatcaccgacgtgtttgaaccaggttctacggttaagccgatggtggtgatgactgcgcttcagcgcggtatcgtcaacgaaaatacggtgttgaataccgttccataccgaattaacggccacgaaattaaagacgtggcgcgctacagcgaattaaccctgaccggggttctacagaagtcgagtaacgtcggtgtatccaagctggcgttagcgatgccgtcctcagcgttagtagatacttactcacgttttgggctaggaaaggcgaccaatttggggttggtcggagaacgcagtggcttatatcctcaaaaacaacggtggtccgacatagagagggccaccttctctttcggctacgggctaatggtaacgccgttacaattagcgcgagtctatgcaacgatcggcagctatggcatttatcgcccgctgtcgattaccaaagttgatccgcctgtacccggcgaacgcatcttccctgaatccaccgtacgcaccgtggtgcatatgatggaaagcgtggcgctgccgggcggcggcggcgtgaaggcggcgattaaaggctaccgtatcgcgattaaaaccggtacggcgaaaaaagtggggccggacggtcgctacatcaacaaatacattgcttataccgcaggcgtcgcgcctgcgagtcagccgcgcttcgcgctggtggttgtcatcaacgatccgcaggcgggtaaatactacggcggcgccgtttccgcgccggtatttggtgccatcatgggcggcgttctgcgcaccatgaacatcgaaccggacgcgctggcaacgggcgaaaaaaatgaattcgtaattaatcaaggcgagggaacaggtggcagatcgtaatttgcgcgaccttcttgctccgtgggtggctggactacccgcgcgagaactgcgagagatgacgctcgacagccgtgtggctgcggcgggcgatctctttgtggcagtggtgggtcatcaggcggacgggcgtcgatatatcccgcaggcgatagcgcaaggcgtagctgccattattgcagaggcgaaagacgaggcgagcgacggtgagattcgcgaaatgcacggcgtaccagtcgtctatctcagccagctcaatgagcgtttatctgcgctggcgggccgcttttaccatgagccatctgaaaacatgcgtctggtggcggtgaccggcaccaatggcaagaccaccaccacccaactactggcgcagtggagccagttgctcggcgaaaccagcgcagtgatgggaacggtaggcaacggactgttgggtaaagtgatcccgacggagaacacaaccggttccgctgtggatgttcagcatgtgctggccagtctggttgcgcagggcgcgaccttcggcgcgatggaagtctcttctcacggcctggtgcagcatcgcgtggcggcgttgaaatttgccgcctccgtgtttactaatttgagccgcgaccatctcgactatcatggcgatatggcgcattacgaggcggcaaaatggatgctttattccacccaccatcacggtcaggcaatcgtcaacgccgatgatgaagttggacgccgctggctggcgtcgctacccgatgcggtcgcagtatcgatggaagggcatatcaaccctaactgtcacggtcgttggctgaaagcggaggcggtggagtaccacgaccgcggagcgacgattcgttttgcttcaagctggggtgacggcgaaatcgaaagccgcctgatgggcgcgtttaacgtcagcaacttactgctggcattggcgacgctgctggcgctgggctatccgttaacggatttgctgaaaaccgccgcgcgtttgcagccggtttgcgggcgtatggaagtgttcactgcgccaggcaaaccgacggtggtggtggattacgcgcacacgccggatgcgctggaaaaagcgttgcaggcggcgcgtctgcattgcgccggaaaattgtggtgcgtctttggctgtggcggggatcgtgacaaaggtaagcgcccactcatgggggccattgccgaagaattcgcggatatcgtcgtggtgactgacgataacccgcgtaccgaggagccgcgcgccattatcaacgatattctggccggaatgctggacgccgggcaggtcagggtaatggaaggccgcgctgaggcggtaaccaatgccattatgcaggcaaaagacaatgacgtcgtgctgattgcaggtaaagggcacgaggattaccagattgtcggcacgcagcgtcttgattattcagaccgcgtgaccgcagcgcgtttgctgggggtgatcgcatgattagcgtaacgctcagcaaaattgccgatgtccttggcgccgaacaccgcggggcggatctcacgctcgatacggtcattaccgacacacggaaagtgacgccgggatgcctgttcgtggcgctgaaaggggaacgctttgatgcgcatgattttgctgataaagcaaaagcgaacggcgctggcgccctgctggtcagtcgtcctctggatatcgatctcccgcaggtgattgtaaaagacacgcgtcaggcatttggccaactggccgcctgggtacgtatgcaggtaccggcgcgggtggtggcgttaaccggttcgtccggcaaaacctcggtcaaagagatgaccgccgcgattcttagccagtgcggaaatactctgtataccgcaggcaattttaacaacgacatcggcgtgccgataacgctgctgcgcttaaaccatgattatgactatgcggtaatcgagttaggcgctaatcaccagggagaaatcgcctggaccgttagcctgacgcgcccggaagcggcgctggtcaataacctggcggcggcgcatctggaaggcttcggctcgttggccggcgtggcgaaagcgaaaggcgaaatctataccggtttgcctgagaacggtatcgcgattatgaatgccgataataatgactggctgaactggcaaagcattattggcgatcgtctggtgtggcgcttttcgccgaatgcggcaaacagcgactttaccgctgcgaatatccacgtgacgtcacacggtaccgaatttaccctgcaaacgccgatgggcagcattgatgtgctgctgccgttgccggggcggcacaatattgccaacgcgctggcggccgctgctttatcaatggcggtgggggcgacgctgacggcgattaaagcagggctggcggcgttaaaagccgtacccgggcgtctgttcccgattcagctaagtgaaaaccaactggtactggatgacgcttataacgccaacgttggttcgatgaccgccgcagtgcaggtcctttctgaaatgcccggctaccgcgtgctggtggtaggcgatatggccgagctgggcgcagaaagcgaagcgtgccacctccaggttggtgaggccgcaaaagcggcgggtattgatcgcgtgttaagcaccggaaaactcagtcaggctatcagccacgccagcggcgtcggcgaacattttgccgataaagccgcgctcattgcgcgtttacacgctctgcttcaggagcaaccaatgatgactattttagtgaaaggatcacgcagcgccgcgatggaagatgtggttcatgcgttacaggagaaaggttcatgttagtttggctggccgagcatttggtcaaatattattccggctttaacgtcttttcttatctgacgtttcgcgccatcgtcagcctgttgaccgcgctgttcatctctttatggatgggcccgcgtatgatcgctcgtctgcaaaaactctcttttggccaggtggtacgtaacgatggcccggaatcgcacttcagtaaacgcggtacgccgacgatgggcggcatcatgatcctgacgtcgattgtgatttccgttctgttatgggcttacccgtctaacccgtacgtctggtgcgtgctggtggtattgatcggctacggcattatcggttttgtcgatgactaccgcaaagtggtgcggaaagataccaaagggctgattgcgcgctggaaatatttctggatgtcggttatcgcgctcggcgtggcctttgcgctttatctcgtcgggaaagacacgcccgcgacccaactggtggtgccgttctttaaagatgttatgccgcaattggggctgttttacattctgctgtcctactttgttatcgtcggtacgggtaacgccgtaaacctgaccgacgggcttgatggcctggcgatcatgccgactgttttcgttgccgccggctttgcgctggtggcctgggcgaccgggaacatgaacttcgccaattacctgcatattccgtatttacgccatgcgggcgagctggtgattgtctgtacggcgattgtcggcgcgggattaggattcttgtggtttaacacctatccggcgcaggtttttatgggcgatgtcggatcgctggcgttgggcggtgcgttgggcattatcgccgtgctgctgcgtcaggaatttctgctggtgatcatgggcggcgtctttgtggtggaaactctgtcggtcatcctgcaggtgggctcctttaaactacgcggacagcgtattttccgtatggcgcctatccatcaccactatgaactgaaaggctggccggaaccgcgcgtgattgtgcgcttctggattatttcgctgatgctggtgctgattggcctggcaacgctgaaggtacgttaatcatggctgattaccaggacaaaaacgtcgtcattattggtctgggcttaaccggactctcttgcgtggacttttttctcgctcgcggcgtgacgccgcgggtgatggatactcgcgtgacgccgccgggtctggataagctgccgcaagaggttgagcgtcacgttggcggcctgaacgacgagtggctcttagcggcggatttaatcgtcgccagccctggtattgctctggcgcacccttcgctgagcgctgccgccagcgctggagtagaaattgtcggcgatatcgaactgttttgccgcgaagcgcaagcgccgattgtagccatcaccggctcgaacggcaaaagcaccgtgaccaccttagtgggcgagatggcgaaagcggcgggcgtcaatgtcggcgttggcggcaatatcggtcttccggcgctgatgctgctggatgccgatcgcgaattgtacgtgctggaattatccagtttccaactggaaactacctcaagtttgcaagcggcggcggcaacggtgctcaacgtcactgaagatcatatggaccggtatccgtttggtttgcaacagtaccgggcggcgaaactgcgcgtctacgagaaggcgaaagtgtgcgtagtgaatgccgatgatgcgttgacgatgccggttcgtggggccgatgagcgctgcgtcagctttggcgtcaatatgggcgattatcaccttaatcgtcagcagggcgaaacctggctgcgagtcaaaggcgagaaggtgctgaacgtgaaagagatgaagctttccggtcagcataactataccaatgcgttagcggcgctggcgctggcggatgccgtaggtctgccgcgcgccagcagtttgaaggcgttgacgacatttactggtctggcgcatcgcttccagctggcgttggagcataacggcgtacgttggatcaacgactcgaaagcgaccaacgtcggcagtaccgaagcggcgctaaacggtttgcatgtggacggtacgctacatctgctgctgggcggcgacggtaagtcggcagacttttctccgctgacacgctatctgaccggcgatcgtatccgcctgtattgctttgggcgcgatggcgcgcagcttgccgcactgcgtccggaaatcgcccaacagactgagacgatggaagaggcgatgcgtttgctggcgccgcgcgttcagccgggtgatatggtgctgctgtcgcccgcctgcgccagcctcgatcagtttaaaaattttgagcaacggggcgatgtctttacccgtctggcgaaggagttaggttgatgcgtttatctctcccccgtctgagaatgccgcgcgtaccaggctttggcctcctggcctggctgtttgcggcgcttaaaggctgggtgatggcttcgcgcgataaagacgccgacagtctgatcatgtatgaccgcacgctgctatggctgaccttcgggctggcggcgattggttttgtcatggtgacgtcggcctccatgccagtcgggcagcgcctggcgaacgatccgtttttgtttgccaaacgtgatgcgctctatatcttcctggcattttgtctggcgatggtcacgctacgtttgcccatgaccttctggcaaaaatacagcacgacgatgctgattgcgtcgatcattatgctgcttatcgtgctggtcgtcgggagctcggtcaacggggcgtcgcgctggattgcgctggggccgctgcgtattcagcctgcggagtttaccaagctgtcgctgttctgctacctcgcgaactatctggtgcgtaaggttgatgaagtgcgaaataacctgcgcggctttttaaaaccaatgggcgtgattctggtgctggcggtgttactgctggcgcagcctgacctcgggacagtggtcgtactgtttgtcaccacgctggcgatgctgtttctcgccggggcgaaattatggcagttcatcgccattatcgggatgggcatctcggcggtgattctgttaatcctcgccgaaccgtatcgtattcgccgtgttacctcgttctggaacccctgggaagatccgttcggcagcggttatcagctgacgcagtcgctgatggcttttggtcgcggtgagatatgggggcaagggctggggaattcggtgcagaaactggagtatttgccggaggcgcacactgatttcatcttcgccattattggggaagaactgggttatatcggtgtggtattggcgcttttaatggtattcttcgtcgcttttcgcgcgatgtcgattggccgtaaggcattggagattgaccaccgtttttccggatttttagcgtgttctatcggtatctggtttagtttccaggcgctggtaaacgttggcgcggccgcggggatgctgccgaccaaaggtcttacgctgccgctgatcagttatggcgggtcgagtctgttgattatgtcgacggccattatgtttttattacgtattgattatgaaacgcgtctggaaaaagcgcaggcgtttacacgaggttctcgatgagtggtcaaccgaagcggttaatggtgatggcgggcggtaccggcgggcacgtgttcccgggactggccgttgcgcatcatttaatgtcccagggctggcaggttcgctggctgggtaccgccgatcgtatggaagcggatttagtgccgaagcatggcatcgacattgactttattcggatctccggtctgcgcggtaaaggcgtaaaagcgcttctggcggcgccgctgcggatttttaacgcctggcggcaggcgcgggcgatcatgaagcggtttaagccggatgtcgtgctgggaatgggcggttatgtttccggccccggcggtcttgccgcctggtcattgggtattccggtcgttttgcatgagcaaaacggtatcgccgggctaaccaatcagtggctggccaaaatcgcgaccacggtgatgcaggcgtttcccggtgcgtttccgaacgcggaagtggtgggtaacccggtgcgtaccgacgtactggcgttgccgttgccgcaggtgcgtctggccggtcgtgacggcccgattcgcgtgttggtggtcggcggttctcagggggcgcgagtcctgaaccagacgatgccgcaggttgccgccagactgggcgatacggttacaatctggcatcaaagcggaaaaggcgtgcagcacacggtagagcaggcgtatgccggggtgggacaaccgcagcataaggtaacggaatttatcgatgacatggccgccgcctatgcgtgggcggatgtggtggtgtgccgttccggcgctttaacggtgagcgagatcgccgccgccgggttaccggcgatattcgtgccgtttcagcataaagacaggcagcagtactggaatgcgctgccgttagaaaacgccggcgcagctaagatttttgagcagccgcagtttactgtagaggctgtcgccgacaccctggcggggtggtcgcgcgaggcgttgttaaccatggcggagcgtgcccgcgcggtatccattccggatgctaccgagcgcgtcgccagtgaagtcagccgggttgcccggacataatttgtggcggtgccttttgcatcgcagggtttttctaccctcaataatttgggttgcaggcaagccaacgcatctgcaatttgaagtatggcgggtattggagttaatggcgtaaagaatgaatacacaacaactggcaaaactgcgttccatcgtgcccgaaatgcgtcgcgttcggcacattcactttgtcggcatcggtggtgctggtatgggcggtattgccgaagttctggccaatgaagggtatcagatcagtggttccgatttagcgccgaatccggtgacccagcagttgacgagcctgggggcgacgattttctttaaccatcgtccggaaaatgtgcgtgatgccagcgtggtcgtcgtttccagcgcaatttccgcggataacccggaaattgtcgcggcgcatgaagcgcgtattccggttattcgccgtgcggaaatgctggcggaactgatgcgttttcgccacggcatcgccattgccgggacgcacggaaaaaccacaacgaccgcgatggtgtccagtatttatgccgaagcggggctggacccgacttttgtgaatggcggactggtgaaagccgcaggcgttcatgcgcgtctgggccatagtcgttacctgattgccgaggcagatgagagcgacgcgtccttcctgcatttgcagccgatggtcgcgatcgtcaccaacatcgaagccgaccatatggatacctatcatggcgactttgaaaatttaaagcagacgtttattaacttcctgcataacctgccgttctacggtcgcgcggtaatgtgcgtcgacgatccggtcatccgcgagctgctgccgcgggtggggcgtcagaccacgacgtatggctttagcgaggatgctgacgtccgcgtagaagattatcagcagatagggccgcaggggcactttacgctgttgcgccagggaatgccggatctgcatgtcacgttgaatgcgccgggtcgccacaatgccctgaatgccgccgcagcagtggcggtagcgaccgaagaaggcatcgacgatgacgctatcctgcgcgcgctggaaagcttccaggggaccgggcgtcgttttgacttcctcggcgagttcccgcttgagccggtgaatggtaaagccgggacggcgatgctggtggatgactatggccatcatccgactgaagtagacgccaccattaaagctgcgcgagcagggtggccggataaaaacctggtgatgctgtttcagccgcaccgttacacgcgcacgcgcgatctgtatgacgatttcgccaatgtgctgacccaggtcgatgcgctgctgatgctggacgtttacccggcgggtgaagcgccgattccgggcgcggatagccgttctttatgtcgtacgattcgtaatcggggaaaaattgacccgattctggtttccgatccggctcaggttgcgacaatgttagcgccggtgctgacgggtaacgacttgatattagtgcaaggcgcaggaaatgttggcaaaattgcgcgttacttatctgaaatcaagctgaagccgcaaatccaggaggaagagcaacatggctgataaaatcgcggtcctgttgggcggaacctctgcggagcgggacgtttcgttaaattccggcgcggcagtgttggccgggttacgtgaaggcggtattgatgcgcatcccgtcgatccgcaagaggtcgatgtcgcgcagcttaaagcaatgggctttcagaaggtctttattgcgttgcatggccgcggcggtgaagatggcaccttacagggaatgcttgagctgctcggcctgccttataccggcagcggcgtgatggcctcggcgctttccatggataaactgcgcagtaaattgctgtggcagggcgcgggcttaccggttgcgccgtgggtcgcattgacgcgcgctgagtttgaaaaaggccttagcgaagaacaaaaagcgcgaatttcggcgctgggtttaccgctgatcgtcaaacccagccgtgaaggctccagcgtcggtatgacgaaagtagtagaagaaaatgctttacagggtgcgttatcattggcttttcagcatgatgacgaaatactgattgagaaatggctgtgcggtccggaatttacggtggcgatagttggcgaagaaattttaccgtcaattcgtatccaaccggcaggaaccttctatgattatgaggcgaagtatctctctgatgagactcagtatttctgccctgccggtttagatgcgtcccaggaagccgcgctacagtctctcgtcctgcaggcatggaaagctttaggctgcacgggatgggggcgtattgacgtcatgctggacagcgatggtcagttttatctgctggaagccaatacttctccggggatgaccagccatagtctggtgccgatggcggcgcgtcaggcgggaatgagcttctcgcagttagtggtacgaattctggagttggcggactgatatgtcgcaggctgcgctgaacacgcgaaacagtgatgaagagacgccttcttcacgccgcaataatggaacgcgtcttgcaggaattttattcctgctgacggtactgtgcaccgtgtttgttagcgggtgggtcgtgttagggtggatggaagatgcgcagcgtttaccgttatcaaagctggtattaaccggcgagcgtcactacacgcgtaacgatgatatccgtcaggcgatactggctctgggcgcgccgggaaccttcatgacgcaggatgtgaacattatccagagccagattgagcgtttgccgtggattaaacaggccagcgtcagaaaacagtggcctgatgaattgaagattcatctggttgaatatgtgccgattgcgcgttggaatgatcaacatatggtcgatgctgaagggaacaccttcagtgtgccgtcagaccgcatcggcaaacaggttttacccatgttgtatggcccggaaggcagcgcgagtgaagtgttgcagggataccgcgagatggggcaggtgctggctaaggataaattcactctaaaggaagcggcgatgaccgcacgtcgctcctggcaattgacgcttaataacggcattaagctcaatctcggcaggggcgatacgatgaaaaggttggctcgctttgtagaactctatccggttttacagcagcaggcgcaaaccgatggcaaacggattagctacgttgatttgcgttatgactcaggtgcggcagttggctgggcgccgctcccccctgaggaatctaatcagcaacagaatcaggcacaggcagaacaacaatgatcaaggcgacggacagaaaactggtagtaggactggagattggcaccgcgaaggttgccgctttagtaggggaagttctgcccgacggtatggtcaatatcattggcgtgggcagttgcccatcgcggggtatggataaaggcggggtgaatgaccttgagtcagtggtgaaatgcgttcagcgcgccattgaccaggcggaattgatggccgattgccagatctcctcggtatatctggcgctttccggcaaacatattagctgtcagaatgaaattggcatggtgcccatttccgaagaggaagtgacgcaagaagatgtggaaaacgtcgtgcatactgcgaagtcagtgcgcgtgcgcgatgagcatcgcgtgctgcatgtgattcctcaggagtacgccattgactaccaggaaggcattaaaaatccggtcggtctttccggcgtgcgtatgcaggcgaaagtacatttgattacctgccacaacgatatggcaaaaaacattgtcaaagctgttgaacgttgtggtctgaaagttgaccaactgatatttgccggactggcggccagttattccgtgttaacggaagatgaacgtgaactgggcgtctgtgtcgtggatatcggcggtggtacaatggatatcgccgtttatactggcggcgcgctgcgtcataccaaagtgatcccttacgcggggaacgtggtgaccagcgatatcgcttatgcctttggtacgccgccgagcgatgctgaagccattaaagttcgccacggttgcgcactgggctccatcgtcggtaaagacgagagcgttgaagtaccgagcgtgggcgggcgtccgccgcgcagcctgcaacgtcagacgctggcggaagtgattgagccgcgttacaccgagctgctcaatctggtcaacgaagagatattgcaattacaggaacagcttcgccaacaaggggtaaaacatcacctggcggcggggattgtgttaaccggcggcgcggcgcaaatcgaagggcttgctgcttgcgctcagcgcgtgtttcatacgcaggtgcgtatcggcgcgccgctgaatatcaccggtctgacggattatgcccaggagccgtattactcaacggcggtgggattgcttcactacgggaaagagtcccacttaaacggtgaagcagaagtggaaaaacgtgttacggcatcagttggctcgtggatcaagcgacttaatagctggctgcgaaaagagttttaatttttatgaggccgccagatattacggcctcaggcgacaggcacatgacggagagagattatgtttgaacctatggaactaaccaacgacgcggtgattaaagtcatcggcgtcggtggtggcggcggtaacgctgttgaacacatggtgcgcgagcgcatcgaaggtgttgaattcttcgcggtgaataccgacgctcaggcgttgcgtaaaacggcggttggccagaccattcaaattggtagcggcattaccaaaggtctgggcgccggcgctaacccggaagtcggtcgtaacgcggcggacgaagaccgtgaagcgctgcgtgcggcgcttgaaggcgcagacatggtatttatcgcggcaggcatgggcggcggtaccggaaccggcgcggcgccagtggttgctgaagtggcaaaagatttaggtattctgaccgttgccgtggtgactaagcctttcaattttgaaggcaaaaagcgcatggcatttgcggagcagggtattaccgagctgtccaagcatgtggactcgttgatcaccatcccgaacgacaagctgctgaaagtgctgggccgtggtatctccctgctcgacgcgttcggcgcggctaacgacgtgctgaaaggcgcggttcagggtatcgcagagctgatcacccgcccgggcctgatgaacgtcgactttgctgacgtgcgtaccgtgatgtctgaaatgggctacgcaatgatgggctccggcgtggcgagcggtgaagaccgtgcggaagaagcggctgaaatggctatttcttctccgctgctggaagatatcgacctgtccggcgcgcgcggcgtgttggtcaacattacggcgggcttcgacctgcgtctggacgagtttgaaaccgtcggtaacaccattcgcgcgtttgcgtcggataacgccaccgtggttatcggtacctctctgggcccggatatgaatgatgaactgcgcgtgacggtagtggcgaccggtattggtatggacaaacgtccggaaatcaccctggtgaccaataaacaggtgcagcagccggtgttggatcgttatcagcagcacggtatggcgccgctgacgcaggagcaaaaaacggtcgcgaaagtggttaacgacaatacaccacaggcggcgaaagagccggattatctggatatccccgcattcctgcgtaagcaagctgattaagaattagctggaatttgggattctgggctctttgtgctaaactggcccgccgaatgtatagtacacttcggttggataggtaatttggcgagattatacgatgatcaaacaaaggacacttaaacgtatcgttcaggcgactggcgtcggtttacacaccggcaaaaaagtcaccctgacattacgccctgcgccggccaataccggggtcatctatcgtcgcaccgacttgaatccaccggtagatttcccggccgatgccaaatctgtgcgtgataccatgctctgtacgtgtctggtgaatgagcatgatgtacggatttcaaccgttgagcacctgaacgctgctctggcgggcttaggtatcgataacatcgttattgaggttaatgccccggaaatcccgatcatggatggcagtgccgctccgtttgtctacctgctgcttgacgccggtattgatgaactgaactgcgccaaaaaattcgtacgcatcaaagagactgttcgggttgaagatggcgataaatgggctgaattcagaccgtacaatggttttacgttggatttcaccatcgactttaaccatccggcgatcgattccagcagccagcgctacgcgatgaacttctctgcggatgcgttcatgcgccagatcagccgtgcgcgtaccttcggttttatgcgtgatatcgaatatctgcagtcccgcggcctgtgcctgggcggcagcttcgattgtgccatcgttgttgacgattatcgcgtattgaacgaagacggcctgcgttttgaagatgaattcgttcgtcacaaaatgcttgacgcgatcggtgacttgttcatgtgtggtcacaatattattggtgcgtttaccgcgtataaatccggtcacgcattgaataataaattgttacaggcagtcctggcaaaacaggaagcctgggaatttgtgaccttccaggacgacgcagaactgccgttggctttcaaagcgccttcgacggtactggcataacgacatacgctgtcgtataaaattcgactggttaacctggcactctctccggccaggcgagccagttgttttttttactatcctttatctgcgctttccttaatacagccattttgacagggttaaatggaaacacggcgcgttcgctgttttcttagccgattttcaccttagcttctcgtcattactgctgtagcgcgtacgctttaatgataagatttgtgcgcaaattgttttgattccgtaagcccatgaggggcatatcaggtggcaatgacgtgagtggaatactgacgcgctggcgacagttaggcagacgatacttctggccgcatctcttattagggatggtcgcggcgagttttggtttgcccgcgctcagtaacgccgctgaaaccaatacgcctgcaaggacgaccgccagcaccgcgtctaaagttaactttagccattttgcgctgttagaagcctctaaccgtcgtcccaatttcaccgtagattactggcatcagcacgctattcgcacggtgattcgccacctttcttttgcaatggcgccgcaaacgctgcccgttgccgacgcgccgtcgccattacaggcgcatcatatcgccttactgaatacgctcagcgcgatgctcacgcaggagggcacgccgccggcgattgttcgtcgcctctccctggcgtattttgcgccacaaaccgcatttagcatcccggcctggataagtcaggcgcagggtatccgcgccggtccgcaacgtctcagctaacgaaaaaagacccttttactttatttgtagctccgcggcgcggggcatttgagactttattatgctaatcaaattattaaccaaagtattcggtagccgtaacgatcgtacgctgcgtcgtatgcgtaaggccgtcagccttattaatgcgatggaaccggagatggaaaaactctccgatgacgaactgaaagcgaaaaccaacgaatttcgcgcccgtattgaaaaaggcgaaagcgtagagagcctgattccggaagcgttcgcggtggtgcgtgaagccagtaaacgcgtctttgggatgcgtcacttcgacgttcagctattgggtggtatggtgctcaacgatcgctgtatcgccgaaatgcgtactggtgaaggtaaaacgctgaccgcaacgctgccagcctacctgaacgcgctgtccggcaaaggcgttcatgtggtaaccgtgaacgactatctggcgcagcgtgacgccgaaaacaaccgcccgctattcgaattcctcggtatgtccgttggtatcaacctgccaggtatgcctgcgccagccaaacgtgaagcttacgctgccgacatcacttacggcactaacaacgaatacggttttgactacctgcgcgacaacatggcgttcagcccggaagagcgcgtgcagcgtaaactgcattatgcgctggtggatgaagtcgactccatcctgatcgatgaagcgcgtacgccgctgattatttccggcccggcggaagatagctcggaaatgtacaaaaaagtgaacaaaatcattccgcacctgattcgtcaggagaaagaagattctgacactttccagggcgaaggccacttctccgttgatgagaaagcgcgccaggttaacctgaccgaacgcggtctggtgctgatcgaagagctactggtgcaagaaggcattatggatgaaggcgagtcgctctactcgcctggcaatattatgttgatgcatcacgtcaccgccgcgctgcgcgcgcacgcgctgtttacccgtgacgtggattacattgtgaaagacggcgaagtcatcattgttgatgaacataccggtcgtaccatgcaggggcgtcgctggtctgacggtctgcaccaggcggtagaagcgaaagaaggcgttgaaattcagaatgaaaaccagacgctggcgtctattaccttccagaactacttccgtctgtatgaaaagctggccggtatgaccggtacggcggatactgaagccttcgaatttagttctatctataagctggacaccgtcgttgttccgaccaaccgtccgatgatccgtaaagatttgccggatctggtctacatgaccgaagcggaaaaaatccaggccattatcgaagatattaaagaacgtaccgcgaacggtcagccagtgctggtcgggacgatttctatcgagaaatctgaagtggtctccagagagctgaccaaagcgggcatcaaacataacgtactgaacgcaaaattccacgccaacgaagcaggcatcgttgcgcaggctggttatccagcggcggtcactatcgctaccaacatggcgggtcgtggtaccgatattatgctgggcggtagctggcaggcggaagtcgctgcgctggaagcgccgacggaagaacagattgcgcagattaaagcggactggcaggtacgccatgacgcggttctggctgccggcggcctgcatatcattggcaccgagcgccatgaatcccgccgtatcgacaaccagctgcgtggccgttccggtcgccagggcgatccgggttcttcccgtttctacctgtcgatggaagatgcgctgatgcgtattttcgcctccgatcgtgtctccggtatgatgcgtaaactggggatgaagccgggcgaagcgattgagcacccgtgggtgacgaaagctatcgctaacgcgcagcgtaaagtagaaagccgtaacttcgatattcgtaagcaactgctggaatatgatgatgtggcgaacgatcagcgtcgtgcaatttatacccagcgtaacgaactgctggatgtgtctgacgtgagcgacaccattaacagcattcgcgaagatgtctttaaggagactatcgacgcctacattccgccgcagtcgctggaagagatgtgggatatcccgggtttgcaggaacgcctgaaaaacgacttcgacctggagatgccgattgccgaatggctggataaagagccggagctgcatgaggagacgctgcgtgagcgcatcctggcgcagtccatcgaggtgtatcagcgtaaagaagaggtggttggcgctgaaatgatgcgtcatttcgaaaaaggcgtgatgctgcaaacgctcgattccctgtggaaagagcacctggcggcgatggattacctgcgtcagggtattcatctgcgcggctatgcgcaaaaagatccgaagcaggaatacaagcgcgaatccttcgctatgttcgccgcgatgctggaatcgctgaaatatgaagtgatcagtaccctgagcaaagtccaggtacgtatgcctgaagaggtcgaagcgatggaaatgcagcgtcgcgaagaggcggagcgcctggcgcagatgcagcagctaagccatcaggatgacgatgccgccgtggctgccgatctggccgcccaaaccggcgaacgtaagattggacgtaacgatccttgcccttgcggttccggtaagaaatacaaacagtgtcatggtcgcctgagctaatgcgataaacttaccggcctgataagacataatgtgttgccatcaggtcagtactggcattattgccgaagggcgctacgcttattcggcctggcattgaacacagataaaaaggcgcaggcgactgcgccttttttatggatgcaacaagatgaaaaaactgcaaatcgcggttgggattatccgcaacccgaacgacgaaatttttattacccaacgcgccgctgatgcgcatatggcgaacaagctggaatttcccggcggaaaaattgaagccggcgaaacaccagagcaggcgttgatccgggagctacaggaagaggtggggattacgccaacacaggtgacactattcgacactctggaatatcaattcccggatagacacattacgctgtggttttggctggttgaacgctgggatggcgaaccgtgggggaaagaaggacagccgggacggtggatcgcgcagaacgcgttgagtacggacgattttccgccggccaatgaaccgattattcgtaaattacgccaatttgcgctttagtgggggatcgcaacacgatccccatcgatcttattagcgatttaatgtcgacataatttccggccagtagcgggggccggccgcggcgtcgtgaggaaaaaccgcctcaattgccgtcagctcctgcgggcttagggtcagtgataacgcgccgaggttttcatccaccctggcgcagtggcgggtgccgggaatgggaacgatgtgcctgttgcgggccagcagccaggccagcgctaattgtgcgggggtacactctttttcgcgtgccatttgttttattgcttcagccagacgtaaattgcgcgagaagttctcacccatgaacctgggatttgtgcgacggaagtcattcgcagcaaaatcttctggcgttttaatcgtaccggtcagaaatccgcgtcccagcgggctgtaagcgacgaatcctatacccaaccgttcacaggtggaaagtgctgaaatttccgcttcgcgggaccaaagcgaatactcactttgcagcgcggtaatagggtgaacgttatgggcggttccagcgtttgcgttgatgcttcggatagcccgagataacgcacttttccctcgcgcaccaggtccgccattgcaccgacagtctcttctatgggaactgatggatcaacgcgatgttgatagtacagatcgatatgatcgacccccaggcgttgcaggctttgctcacaactacggcgaacgtactccggtctgccattgacgccacgcgccatagggttagcagggtcgagaacgataccaaatttcgtcgctaaaaatacccgatcgcgacgatcggcgatggctcttccaactaacctttcattggtataagggccatacatatctgcggtatcgagcagtgttaccccctgatctaacgcataatgtagcgtcttaattgaggtgctgtcgtcatgagcgccgtaaaatgcgctcatgcccatacatcccagtccgatggctgacactcgcggtccgtttgcgcctaatgtacgatattgcatactacctccatgaggatattttgtgcatggcaggcagtctatacctggcgtataagatgaaaaatagggggaataagcatggtttatgaaggctggcttaataatgcgtcatgatgtgatgtccatattgcatgctttttgcatgattgctgaaaaccatagcttcacgcgggcagcggcgcagttacatatttctacatcggcgttaagtcagaatatgcgccaactggaggatgaacttggcgtgaaattgttgaaccgaaccacccggcgtgtcggtttgacagaagcaggacatgcctttcttgccagtatcaggcccgcattaaaccatattgatgaggcgatggaacatgcccgccagagccgcgatatacccggagggacattacgcctgaccgtaccgcgcacggcggctacgcttctgttacaacctaatctcgccggtttcatgcgcgattatcccgatattcggctggatatcgatgtgaatgacggttttgtggatttaattaacgaacgctttgatgccggtattcgctttggcgatgcggtacaacttgatatgaatgtcgttccgctcggtgatgttttacgcccggcgatcgtagcatcccctgcataccttgcgcgttttggcacgccgctgcaccctcaggaactcatcaatcaccgctgcctttgccatcgttttacgcgtgagagcgggctatatcggtgggagtttgttcacggagcgcaacggctggaaattacgccggaagccgcgttaatggtgaatgataaagcgttgcgtctctccgccgcgcgtgatggggcagggctaacctatgtttttgaacaggatgtccacgaagacttacaggatgggcggttgtgttccgtacttgaggagtggctgcctgcggcggaccggttttatttgtattatcccggccgcgcgcatatggcgccaaaactacgcgtatttattgattatttttgtcataaggcgatattgccgtctcaacagagccatcaccgttagcgctcttcgctccagtcgtcgctatcagactggtcgccgctgctggcgattcgtttctcttcggcggcccattcgcccaaatcaattaactgacagcgtttagaacaaaatgggcggaaggggctaatttccccccagacgaccggtttaccgcaggtcggacagtttacgacggtcacgtcagacatttttactccttagcaacaggccagttcaaaatcaagacgctccggcaccagaccattttcactatccagcggcataaagcgaatggcaaaacggctcttatggccggaaatttgcggataaagttgtgaatcgagcgtcagcataagacgcagcaaatcggcgtcgtccccgttatcctgataaaaaccgttcaggctggtttgcttacggaaaggcgctgaattacggatcagatcaagcaccagcgtcagcgcctgggtgaggggattcaggctggcaagccagctttcaatctgggcgtcgcgctgcgcctgttgtaggtgtaaccagatatgcagagtgggtaaatcgaaactgcaacagccgccaggaatacttaagcgttgacgcacaagggcaatcaagcgatcttcgcgtagctgctggccaatcctcggggcggagatcagcacgctgcccgcggattttaactgctggcgcagggcttcaatacggtcttgatcgacgccgggaacctcaacccaggcctgtaatttacgctgctggcgctccagttctttcagcagttcggtacggacttcgccccgttcgaatacatccagtagatcgctgatgttacggaaaaaatgcagtgcgccagcatggtctgcaattggcaggttgatggagagctgttggattaaaaactctatgcgcagccacgtacgcatcttctcattgagagggtgttcaaataggacctgggtgtgcattacggtttttcctgtgagacaaactgcgacgcgagcttaagataactggcgtgcaggcgggccacatctgatgcgatagcatccggtgcgccgttattatcaataacatcgtccgccacggcaaggcgcgcttcacgcgtcgcctgcgcagcgagaatgtgttcaacatgctcgcgcgtaacatcatcacgctgcattgtgcgtatgagctgcgtttcgggcgtcacgtcaaccaccagtacgcggttggctttttgatacagcctgttttcaaccagcagaggcacaacccataacacatagggcgacgtagcctgttgaaactgtcgttgggtttcctgctgaattaagggatgaagcagagcgttaagccaggctttttcttccggatgcgaaaaaatacgctcacgcagcgcccggcgacgtaacgtgccgtcggcggcgataagttcagaaccaaaatgttccgctattgcgttcagggcgggctgccctggctcaaccatctggcgcgcaataatatccgcgtcgatgacggttattccgaggtcagcgaaggcatcagcgacggtacttttaccgctgccaataccgccggttaaggctacggtatacctcatatctccagcttccggaattttagtttgacaatcaaaaggttaaattttaagcatgcaaagacgatacgctctgagcattaacctactattcgctaggtaaatttatgggattgtaacgtaaaaaaagagaatttcgcagtcttgtacggccatgattagtgcgtatgatagcgtcactggagttgtgagtttcgatttttcgccattaaccccaggaatccgtacatgcgtattgaagaagatctgaagttaggtttcaaagacgttcttatccgtcctaagcgttctaccctcaaaagccgttccgatgtcgaactggaacgtcaattcacctttaaacactcaggtcagacctggtctggcgtaccgattattgcggccaatatggataccgtcgggacgtttgaaatggcgcaagcattggccgggtttgatattctgactgctgtacataaacattataccgttgaagagtgggcagcttttatcaacacggcttcggctgatgttctgaagcatgtgatggtttccaccgggacctctgatgctgatttcgaaaaaaccgtgcagattctggcgctgaatcctgcgctgaactttgtctgtattgatgtggccaatggctattcagaacattttgtgcagttcgtcgcgaaagcacgtgaagcatggccgacaaaaacaatctgcgcaggcaatgtggtaacgggcgagatgtgcgaagagcttatcctctccggcgccgatatcgtgaaagtgggaattggtcccggctccgtatgcacgacgcgtgtaaaaactggcgttggttatccgcaactgtcggcggttatcgaatgtgctgacgcggcgcatggcctgggcggcatgatcgtcagcgatggcggctgcaccatgccaggcgacgtagcaaaagccttcggcggcggcgcggatttcgttatgttgggcggcatgctggcgggtcacgaagagagcggcggcagcgtggtagaagagaacggcgagaaatttatgctgttctacggcatgagttcggaatctgcgatgaaccgtcatgtcggcggcgttgcgaaataccgcgcggcagaaggtaaaacggttaaattgccgctgcgtgggccggtgggcaataccgcccgcgatatcctgggcggtctacgctcagcctgcacttatgtcggcgcgtctcgcctgaaagagttgaccaaacgcaccacctttattcgggtgcaggaacaagaaaaccgcattttcaatagcctctaatattctggctggcgtaaatgtgcgccagccttatcccatcccgctcatcgcgtctcccaaatgaaaaatcggcaaatacatcgccaccaccagcgtaccgataattaagccggtgatgatcaataacgccggttccaacagcgacgccagattatcggccagcgccagcgtagattcactgtggtgacgggcaaggttatgcagcatgatatcgagtgagccggacgcttcgcccgttctgaccagttgcaggcatagtggactaaattcctgggtattttttagcgccaaccagaccggattgcccgcggcgatctcctgatgtacctgcgttaaacgctgtgaccagtaagggcagccgagactctcgatagcgctttccagtccctgaagaaaaggaatgcctgcgctttgggttaatgccagtacggtgaatatttgcgctagtttctggcctcttatcaggcgacccataacgggaagccgtagcagaagacgctgccgctgcgcttgccaggacggcttttgttttaccctgcggtgagcgatagcaacgagcatcgtcaggaacaagatgagccaaccccatgccgacccccattgcgctatcgcaataataccgcgcgtcagaagaggaagcggggtattgaagctacggtaaatggcggcaaattccggcaggacaaagtgcagcatggcgaaaacgaccagggcggccattgttagaataattgcgggatagcgcagcgcctttttcacgctaaccgtaatctgccgttgcgctttttgctgacgggccagttcaaagcagcattcggccagtttgccggtcagttctccggtgcggatcatcgtctggtagagcggcggaaatacctgcggccaggagactaatgcgctggaaaaagggacgccctgttcaagctcgtgagccagcgtgcgcaacagcgcttgccattgtcggtggggatgctgtttcgcaaggagttccagcccttctgaaagcgtcagcccggcatgaatgagcgtggccaactgatgaataatttcagcgctttgctcttctttccacagtgcggcgttaacgcctatgcgcttgatgcgaagcggcataatgcgctgatgttgcagggtgatgatcagcgccagacgattgtccacccatacaacgtcttgttccagttgacctttatcgttaacgccttgccagcgccagagctgtttaacgctcatggggcattcccagaacgcgcagtatctcttcaaaggacgtcatgccttgctcaacggcgcgacagccattttcaaaaagcgtccctgtaccggtctgttggaggtgggcttccagtgcttgcgccgatgcgccgctcgcaattaactgacgtaatgccggggtaacggttaacacttcgaataacgcggttcggccataaaagccgtggtagcaatgctgacagccgtttgcctgccagcgcggtagcgcgctgggccaaagattgggcgatagcactacgggatcgctcaggcgctgtttgcagtgcgggcaaagcttccttaccaggcgttgcgctaccaccagcgtaagcgccgatgagatcatccagcgtgctacgcccatttgctgcaaacgtatcagggtttcactggtggagttcgtatgtagcgttgaaagtaccagatggcccgtttgtgccgccttaatggcgatttctgcggtgtcgccgtcacgaatttcacctaccatgatgatgtcagggtcctggcgtaatagcgcacgcagcacattttgaaaggtgagcccggcgcggggatggatctgcgtctggttaatcccatccagtggaatttctatcggatcctcaacgctacagaggttgatacccggcgtattccgggtttgtagcgcgctgtatagcgtgaccgtttttccgctaccggtggggccagtcaccagtaccagcccctgaggttgctgtagggcttgtctaaaagcggtaagttgtgccccgtacatgcccagcgtgtccagatccagcgtttgttcaacctgatgcaacaaccgtaagacgactttttcgccttctttacagggaagcgtggcgatacgaaaagagatgctgtcgcccgccaggtcaacggtaaattgcccgtcctgcggcagtcgatgttcagcgatgtccaaatttcccaggactttcaatctggccgtcagcgcaagccccgtctctttggcgatgtcctgcagaatatgaagaacgccgtcgatgcggagtcttattcggtagcggctggcgccgggttcgagatggatatcagaggcgcgtttcgccatcgccgagcgtaatgtctgattgagaagctgggctgcggtttctccgcctttcgcggcgtttgccgagggtgcctgatccggcttatgccgatgattttccatttgctggcgagtccagcacacaatatcaatctgtttttgcgtggcgaaatgcagagcgtccagtaacgcatgagagggcgcgtcgaccaccgcaacagtgatactgttgctggcgctattgatcagtacagcctgatgacgttgacacaaggtgttgagctgagcgtctttcatcttgtctccttagttggcgtcaaaacggaagacatcttcacaagcctgttgtaacgcgctgtcgctttgaatattgcagttacgcgtccagccagtaatgccgttagcattgtcccaggcgggcgtcatgatgacgctaagcccgctcagactctcctggccggtaagcgtgatgacgcctttttccacgctcatgcccgaaacataacgggtgatgacgggcgaggggataccgttgacgcccgcatcgcatgtgctcgtcccaccatgttccagagcgcagagttcgacggcagtacggtaggggacaaacgtttgcaacatatccgtcagcgccgctttacgcagatagttctggtaagccggaatgccaatggcgcttaaaatggcgatgatgccaataacgaccatcagttcgataagcgtgaaaccgcgttgtttttccattgttcgctccttgagttagctggcgctactgtggcaaacgcgggaagagcgggcgagcggcaaaaggtaaaacgggaaggcggattctgaagattttcgctgcgttacatgacacggcaacgttattgcgaggcgctacgaatgttttaccgaataatgacgcggatctacggacaggtgatttatagacccgacggcgcagcgccatcgggtggagaggatcagcaaaaacgcatggagagatcgagcgcgcgcacgtgcttggtcagcgcgccaacggagatgaaatccaccccggtttcagcaaattcgcgtaaggtttccgcggtgacgttgccggatacttccagccgcgcctggccgttgacgcgtttcaccgcctcgcgcatctggtcggtgttgaaattatccagcatgatgatatccgcgcctgctttcagcgcatcgtccagttcatccagattttcgacctcgacttctaccggcacgtccggatgtagccagaacgctttttccaccgcctgacgaaccgaaccggaggcgatgatatggttttctttaatcaggaacgcgtcagtgaggcccagacgatgattggcgccgccgccgcataaaaccgcatatttgagcgcggtgcgcagacccggcagcgttttacgcgtgtcgagcaactgggtttgggtgccagccaacagtccaacgtagcggcgtacttcactggcgacgccggaaagggtctggacaaagtttagcgccgtgcgctcgccggtcaacaatacgcgagccgggccgttcagttcaaacactgtttggttggcgtgaatggcgtcgccgtcatcgacatgccaggtgaggcgcacatcatcgcccgccagttggatgaagacctcttcaacccagcgcttgccgcagaaaacgccgtcttcacgagtgatcaccgtggcatgggcttgcgtatctgccggcaaaagttgcgcggtgatatcgttgccagcatcgacttctccacctaaatcttcacgcagcgcctgagcaacggcggcagggatatcgagattaatgcgttccagtagcgcgtcacgtcggtcgtctgggttataacggcgaggcggcatgataaaactccaaattgctaacgaatcataaggtagaaacatgctactctgaagcagctataagcaccactcaaaaggagactccgcatgttgccagataagggttggttagtagaggcgcgacgcgtcccttctccgcattatgattgccgtccggatgacgaaaaaccgtccttgctggtggtgcataatattagcctgccccccggcgagtttggcggtccgtggatcgatgcattattcaccggaacgatagatccagacgcccatcctttttttgcagaaatcgctcatcttcgtgtttcggcccattgtctgattcgtcgcgacggtgaaatcgtccagtatgtgccttttgataagcgtgcgtggcatgcgggcgtatcaaactatcaggggcgggaacgttgtaatgatttctccattggtattgagctggaggggacagatacgctggcttataccgatgcgcagtatcagcagctagccgccgtgacgcgcacgcttatcgcttgctatccggcgatcgccgacaatatgaccggacactgcaacattgcgcctgaccgcaaaacggaccctggccctgcctttgactggccgcgctttcgcgctttggtagccctctcgtcgcacaaggagatgacatgacgctgtttacgacattactggtgctgattgtcgagcgcctgtttaagctgggcgagcactggcagctcgatcatcggctggaggcgctattccgtcggattacgcatttttcgatgttgcgcacgatgggaatgacggcgatcgcgatggtggtgacttttctactgctccaggcgttaaaagggctgctatttaacgtgccgacgctggtggtgtggattctcctgggcgtgctgtgtatcggcgcgggcaaagtgcgagtacattatcacgcctggctgaaagcggcgtcccgtaacgatccgcatccttgcgaggcgatggccagcgagcttacgctgattcacggcgtgccgccggattgtaatgagcgtgagtttttgcgtgagctgcaaaatgcgttgttatggataaatttccgtttttacctcgcaccgctattttggtttatcgttggcggtccatgggggccggtaacgctggtgggctatgcgtttttacgggcctggcagacttggctggcgcgctatcagacgccgcaccaacgtttgcaatccggcattgacgctattcttcatgtgctggactggattccggtacgtctggcgggcgtagtgtatgcattactggggcatggcgagaaagcgttgccggcctggtttgcctcgctggcggatctgcatacttcgcagtatcaggtgctcacacgtctggcgcagttctcactggcgcgcgaaccgcatactgacaaagtagaaacccccaaagcggcggtatcaatggcgaagaaggcctcgtttgtggtggtggtgattattgcgttgctcaccatttatggggcattagtgtagcgttgtgccgatggcgctaacgcttatgctgcctacaatggaaaaatctgtaggcccggtaagcgctagcgccaccgggcagtgcaacggcttagatcgtatcggctggcggcacgccaaaatcaggcatcccgttttcgtcccagcgcacccgtttcagacgcgtatggcggttgggatcgtacaacggatcgccttcaatttcggtgtaatttctcgcgtggtacaccagtacatcttcaccttccggcgtttgcgtaaagctgttatgtcccggcccatactggcgattttcatagctggtggtaaagaccgggcgcggtgatttatgccagttggccggatcgcgcggatcgtcgtttacgttaatccacagtaatcccatacagtagttttcatcggtggcgctggccgaatagctgataaacagcttgtcgccatgcaccacgacggccggaccttcgttaacccaaaaaccccgacactcccagtcgtactctggcttactgagtcttaccggctcgcctttaatcgtccacggattttccagttcagccagataaatatttgagttaccggcaatatccggcgctttttgcgcccacagataccactgctttccctgatgataaaaagtggtggcatcgagggcgaaggtatcaaacggtgttttaatttgacctttctccgtccacttgccggtgagtgggtcggcatcggcgcactccagggcaaacatgcgatgctggaaaattcccagcttatcaagcgcttgagtatgggtagcggcaaaatagatgtaccacttgccgttgatgcggtgcatttccggtgcccagatgagctggctcatcgggccactttccggtttgcgccagacgacaacggggtcggcggcgcgcaacccttccagcgaatcagcccggcggatttccagcctgtcatattccggtacggaggcaataaagtagtaatcgctgccgtcgcgtaaaataaacggatcggcacgttgttcaataaacgggtttggccagtttgccatcaggctttccttacgctttcagcggctttgaggtcctgcaactcactcaattcgcggtaattagtgcgacgtttttccaaatcgtcctggatttttttcatcagttcacggtcaactttcagcagacgtaccacgcctgcggtaatcagatagccaacgccggggataacggtaaacaacagcataataccgttcatcgccgaggcgctttgcgctttggcgctggcgtcataaccgtaccaggagagcaaaaagccgaccatcgccccggcaatcgccaggcccagtttcaggaagaacagattaccggagaagctaataccggtaatgcgtttgccggttttccattcgccgtaatcatcgacgtccgccatcagcgaccagtgcaacggggaagggatctgatgcagaatattgagcaggaagtagagcgccactatcatcacggtagctttcggatcaaagaaatagaacgcgcaggagaaaatcgccagcgcgatattggtccagaaaaataccttcaatttacaccagcgatcggttaagacttttgccagcatactgccgatcatcataccgaccacgccaaggctaataaaaagcgtagcgaaatgggtgctttgtcccatcacccaggtgacgtaatacatggtcgccgccatacggataaaccccgggcagacgttacataaggtcaatagcagaatgcgtacccattgatcgtttttccacacgtctttgaaatcattcttcatatcatcgtgcgtcggaacggcagggcgaacgcgttcgcggacgctggcaaagcagaacagaaacatacccatgccgataatcgccagcacggtcatcgccaactgatagcctttggctttgtcgccgccgccaaaccagtccaccatcggcaatagcgttaacgatagcaacagcgtcgcgatgccgactaacacgaagcgataagcctgacaggccacgcgctcttttggatcgttggtgatcacgccgcccagtgagcaatagggaatattgatggcggtgtaggtcacggaaagcagaaaataggtgacgaaagcatagacaactttgctgttatagccccagtccggcgtcgtgaacatcagcacgctgaacagcgcgtagggaaatgcaatccacagtagccaggggcggaaacgaccatatttactttgggtacgatcggcaagcgcgcccatcaccggatcggtaacggcatcgataacgcgtactgaaaggagtaaaacaccgactaacgccggggcaagaccaaaaatatccgtataaaagtaattaacaaacagcatgatagcgccaaaaataatgttacatccggcgtcacccatgccatacccgattttctctcttaccgaaagtctgcccttatccattgagacttctccccatcagatgatggcggtaattattcgcctgcgagcttttttttgcgtagcaggatcacgccgctgatatggataaaatggttatacgtgggaaactgtgaggcagataacaccctccccggacggggagggcggaaaagtaacgtcacgatcagtgggctttcaccgtttttgccgttttttctttacacagatagccgacgcccaggataagcagccataccggaatcagccacacggagatcgccatacctggcgtcatcagcataatgatcaataccgccgccataaacagcaggcagagaacgttgccgaacggataaaacagggccgggaagcgggttttcacgccctgctgctgtttcgcgcgacggaacatcatatgggcaaggctaatcatcgcccagttaatgaccagcgcggagaccaccagcgccatcagcagtccgaatgcggactctggggccaggtagttgagcagcacgcacaacgcagtcacgacggcggaaaccaaaatggagctcaccggcacgccgcgtttgtcgacgttcagcagcgctttcggcgcatttccctgctgggccagaccgaacagcatacggctgttgcagtaaacgcagctgttataaaccgatagcgcggcggtgagaaccacgatattcagcgcattggcgacaaacgtatcgcccagctcatggaagataaggacaaacgggctggtatcggcggtgacgcgagtccatggcagcagcgaaagcagaaccgccagcgagccgatataaaaaatcaggatgcgatagataacctgattggtagctttgggaatgctctgttccgggttatcggcttcagcggcggtgatccctaccagctccagtccgccgaaagaaaacataataatggccatcatcatcaccagcccggtccagccatgcggcagaaagccgccctgttcccacaggttgcgcacggtggcctgcggaccagcggtatcgctgaagagtaaccacgcgccgaacagaatcatagcgatgacggcgatcactttaataatggcgaaccaaaactccatctcaccgaacactttaacgttggtcaggttgatggcgttgataatcacaaagaaggctgccgcagaagcccaggtggggatctccggataccagaactggatatatttacccactgcggtcagttccgccatggcaactaatacgtacagcacccagtagttccagccggaagcgaatccggcaaagccgccccagtatttataggcgaagtggctaaaagagccggcgaccggttcttcaaccaccatctcccccagctggcgcataatcagaaaggcaataaagcctgcaatcgcatagcccaggataattcctggccccgccgactgaataacggaggcgcttcccaggaacaagcctgtccctatcgcgccgcccaatgcgataagctgaatatggcggtttttcaggccgcgcttgagctgctcgccgtgctgctgactgtccattataaaacctcgtgtatcgagcgcggtttattcataacgcgcttattttgaacgatgcagtagtgcgtgtgtaagtttgcaattccgctttttgtattgatttatttacagattcgtttttttaaatgtcacttcaactctttcgtcttgatcagaataatggtatgtggccgcgaatgcacctgctttgtgcaggggtgatgacgagttgcgtaaaaagaaagcacttgtaaatacctccttttattttcccttacagatgttaatttgtttttattcattatttatgcataaaaatgcatttaatctactgttgaatcggttcagatgagattttttatcgtttcaaatacgttaaatctacctccaggtgggtaaatttaacatttgtgcacagttacagttttgaaacatgatttctgtaaaattgttaaaatgtgcctcctttactgatttcaatcaaaacctgtatggacagaaggtgaatactttgttactttagcgtcacagacatgaaattggtaagaccaattgactccgggcaaatggcttaagacaggaaatcatggcctacagcaaaatccgccaaccaaaactctccgatgtgatcgagcagcagctggagtttttaatccttgagggaacattgcgtcccggagaaaaactcccaccggaacgtgaactggcaaaacagttcgacgtctcccgtccctccttgcgcgaggcgattcaacgtctcgaagcgaagggattgttgcttcgtcgtcagggcggcggaaccttcgtgcagagcagcctgtggcagagctttagcgacccgctggtggaactgctctccgatcaccctgaatcccagtttgacctgctcgaaacgcgccatgctctggaaggcattgcggcttattacgcggcgctgcgcagcaccgatgaagataaagaccgtattcgcgagctgcaccacgctattgagctggcgcaagagtccggcgatctggatgccgagtccgaagccgtgctccagtatcaaatcgccgtcaccgaagcggcgcacaacgtggtattgcttcatctgctaaggtgtatggagccgatgctggcgcaaaacgtgcggcagaacttcgaattgctgtatgcgcgtcgggagatgctgccgctggtgagtacgcatcgcacccgtatatttgaagccattatggccggaaaaccagaagaagcgcgtgaagcgtcacaccgacatctggcgtttatcgaagagattatgctggacagaagccgtgaggagagccgtcgtgaacgcgctttacgccgcctggaacagcgcaagaattagttttttctggcagaacgttaaccagaagatgttgtgaataacgcgcaaaaatgtgcgcggcaactaaacgcagaacctgtcttattaagctttctgacgaaagtttaatgggacaggttccagataactcaacgtattagatagataaggaatacccccatgtcagaacgtttccaaaatgacgtggatccgatcgaaactcgcgactggctacaggcgatcgaatcggtcatccgtgaagaaggtgttgagcgcgctcagtatctgattgaccaactgctttctgaagctcgtaaaggcggcgtgaaagtcgcggcaggcgcaggggccagtaattacatcaacactattgccgttgaagacgaaccggaatacccgggtaatctggagctggaacgtcgcattcgttctgcgatccgctggaacgccatcatgaccgtgctgcgcgcgtctaaaaaagaccttgagttgggcggccacatggcgtccttccagtcttccgccacgatctatgatgtctgttttaaccatttcttccgtgcgcgcaacgaacaggatggcggcgacctggtgtacttccagggccacatctctccgggcatctacgctcgcgcgttcctggaaggtcgtctgacccaggaacagatggataacttccgtcaggaagttcacggcaatggcctctcttcctatccgcacccgaaactgatgccggaattctggcagttcccgaccgtctctatggggctgggcccaatcggtgctatctaccaggcgaaattcctgaaatatctggaacaccgtggcctgaaagatacctctaaacagaccgtttacgccttcctcggcgacggcgagatggatgagccggaatccaaaggcgcgatcaccatcgccacccgtgaaaaactggacaacctggtctttgttatcaactgtaacctgcagcgtcttgatggcccggtcaccggtaacggcaagattgttaacgaactggaaggcatctttgcaggtgctggctggaacgttattaaagtcatgtggggcggtcgttgggatgaactgctgcgtaaagacaccagcggtaagcttatccagctgatgaacgaaaccgttgacggcgactaccagaccttcaaatccaaagacggcgcttacgtacgtgagcacttcttcggtaaatatcctgaaaccgccgcgctggtggccgactggactgacgagcagatttgggcgctgaaccgcggtggtcacgatccgaagaaagtctacgcggcactgaaaaaagcgcaggaaaccaaaggcaaagcgacggtaatcctggcccataccattaaaggttacggcatgggcgacaccgcggaaggtaaaaacatcgctcaccaggttaagaaaatgaacatggacggcgtgcgttacgtccgcgatcgtttcaacgtgccggttgccgatgctgatctcgaaaaactgccgtacattaccttcccggaaggttctgaagaacacaaatacctgcatgaacgccgtcaggcgctgcatggctacctgccaagccgtcagccgaacttcaccgagaagttagagctgcctcaactttcagatttcggcgcgctgctggaagagcaaagcaaagagatttccaccactatcgctttcgtgcgtgccctgaacgtgatgctgaagaacaagtcgatcaaagatcgcctggtgccgatcatcgccgacgaagcgcgtactttcggtatggaaggtctgttccgtcagattggtatctacagcccgaacggccagcagtacaccccgcaggaccgtgagcaggttgcttactacaaagaagacgagaaaggccagattctgcaggaaggtatcaacgagctgggcgcaggcgcatcctggctggctgcggcgacctcttatagcaccaacgatctgccgatgatcccgttctatatttactactctatgttcgggttccagcgtatcggcgacctgtgctggcaggctggcgaccagcaggctcgcggcttcctgatcggcgggacttccggtcgtacaacgctgaacggcgaaggtctgcagcacgaagatggtcacagccacattcagtcgctgactatcccgaactgtatctcttacgacccggcttacgcctatgaagtggctgtcatcatgcatgatggtctggagcgtatgtacggtgagaaacaagagaacgtttactactacatcaccaccctgaacgaaaactaccacatgccggccatgccagcaggtgccgaggaaggtatccgtaaaggtatctacaaactcgaaacccttgaaggtagcaaaggtaaagttcagctgctgggctccggttctatcctgcgtcacgtgcgtgaagcggcagagatcctggcgaaagactacggcgtaggttctgacgtgtacagcgtaacctccttcaccgaactggcgcgtgatggtcaggattgtgagcgctggaacatgctgcacccgctggaaaccccgcgcgtaccgtacatcgctcaggtgatgaacgacgctccggcagtggcatctactgactatatgaaactgttcgccgagcaggttcgtacttacgtaccggctgacgactatcgcgtactgggtacggatggcttcggtcgttccgacagccgtgagaacctgcgtcaccacttcgaagttgatgcttcttatgtggttgttgcagcgctgggcgaactggctaaacgtggcgaaatcgacaagaaagtggtagcggatgcgattaccaaattcaacatcgatgcagataaagttaacccgcgtctggcgtaagaggtaaaagaataatggctatcgaaatcaaagtaccggacatcgggacagatgaagttgaaatcaccgagattctggtcaaagtgggcgacaaagtggaagctgaacagtcgctgatcaccgtagaaggcgacaaagcctctatggaagtcccgtctccgcaggctggcgtcgtgaaagagatcaaagtctctgtcggcgacaaaaccgagaccggtgcacttatcatgattttcgattccgccgacggtgcagctgacgctgcgcctgctcaggcagaagagaagaaagaagcgactccggcagcagcacctgctgcggcagcggcgaaagacgttcacgttccggatatcggcagtgacgaagttgaagtgactgaagtgatggtgaaagtgggcgacaccgttgaagctgaacagtcgctgatcaccgtcgaaggcgacaaggcctctatggaagtgccggcgccgttcgcgggcaccgtgaaagagatcaaagtgaacaccggtgataaagtgtctaccggctcactgattatggtcttcgaagtggcgggcgcagcgcctgccgcagcaccagcgaaagcggaagccgctccggctgctccagcagcagcgacgggcgtgaaagacgttaacgtaccggatatcggcggcgacgaagttgaagtcaccgaagtgatggtcaaagtcggcgataaagttgccgctgaacagtcgctgatcaccgtcgaaggcgacaaggcctctatggaagttcctgcgccgttcgcgggcaccgtgaaagaaatcaaaatcagcaccggcgataaagtgaaaaccggttctctgattatggtcttcgaagtagaaggcgcagcgcctgcggccgctccggctaaacaggaagcggcggcaccggctccggcggcgaaagctgagaagcctgctgccccggctgccaaagcggaaggcaaatctgagttcgctgaaaacgacgcttacgttcacgctaccccgctgattcgccgcctggcgcgcgagtttggcgtaaacctggcgaaagtgaaaggcaccggtcgtaaaggccgtattctgcgcgaagacgttcaggcttacgtgaaagacgcaatcaaacgcgcggaagctgcaccggctgctgcgggcggtggtatcccgggtatgctgccgtggccgaaagtggacttcagcaagtttggtgaagttgaagaagtggaactgggccgtatccagaaaatctctggcgcgaacctgagccgtaactgggtgatgatcccgcacgttacgcacttcgacaaaaccgatatcaccgatctggaagcgttccgtaaacagcagaacgccgaagctgagaagcgcaaactggatgtgaaatacacgccagtggtcttcatcatgaaagcggttgccgctgctctggaacagatgccgcgcttcaacagctctctgtccgaagacggtcagcgtctgaccctgaaaaaatacatcaacatcggcgtggcggttgataccccgaatggcctggtggttccggtctttaaagacgtgaataagaagagcgtgaccgagctgtctcgtgaactgaccaccatctccaaaaaagcgcgtgatggtaagctgaccgctggcgaaatgcagggtggttgcttcactatctccagcatcggcggcctgggaactacccactttgcgccgattgtcaacgcgccggaagtggctatcctcggcgtttctaagtcggcgatggaaccggtgtggaatgggaaagagtttgtgccgcgtctgatgatgcctatctctctttctttcgaccaccgtgtgatcgatggtgctgatggtgcgcgtttcattaccattatcaacaatatgttgtctgacattcgccgtctggtgatgtaagcgaaaaagccggcccgacggccggcttttttttgataatctcatgtattttgtgaggttattagcgaaagcgataattcgtgatccgtttgttgtttcaaaattgttaacaattttgtaagatacgggcggatagaacgacccggtggatgatgggcgatcaagtaccccggaccgccggatacaaataaagaggtcatgatgagtactgaaatcaaaactcaggtcgtggtacttggggcgggcccggcaggctattctgccgctttccgttgcgctgatttaggtctggaaaccgtaattgtagaacgctacaacacccttggcggtgtttgtctgaacgtcggctgtatcccttctaaagcgctgctgcacgtagcaaaagttatcgaagaagccaaagcgctggctgaacacggtatcgtcttcggtgagccgaaaaccgatatcgacaagattcgtacctggaaagagaaagtgatcacgcagctgaccggcggtctggcgggtatggccaaaggccgtaaagtgaaagtggtcaacggtctgggtaaattcaccggggcgaacaccctggaagtggaaggcgaaaacggcaaaaccgtgatcaacttcgacaacgcgatcatcgcggcaggttctcgtccgatccaattaccgtttattccgcatgaagacccgcgcgtatgggattctaccgacgctctggaactgaaagaagtaccgaagcgtatgctggtcatgggcggcggtatcatcggtctggaaatggggaccgtataccacgcgctgggttcagagattgacgtggttgaaatgttcgaccaggttatcccggcggctgataaagacatcgttaaagtcttcaccaagcgcatcagcaagaaattcaacctgatgctggaaaccaaagtgactgccgttgaagcgaaagaagacggtatctacgtttcgatggaaggcaaaaaagccccggctgaagcgcagcgttatgatgcggttctggtggcgattggtcgtgtgccgaacggtaaaaacctcgacgcgggcaaagctggcgtggaagttgacgaccgtggctttatccgcgtcgacaaacagctgcgcaccaacgtgccgcacatcttcgctatcggcgatatcgtcggccagccgatgctggcgcataaaggcgttcacgaaggccacgttgccgctgaagttatcgccgggaagaaacactacttcgatccgaaagttatcccgtctatcgcgtacaccgagccagaagtggcatgggttggcctgaccgagaaagaagcgaaagaaaaaggcatcagctatgaaaccgccaccttcccgtgggcagcttctggccgtgctatcgcttctgactgtgcagacggtatgaccaaactgattttcgacaaagaatctcaccgcgtgatcggcggggcgattgtcggcaccaacggcggcgagctgctgggtgaaatcggtctggcgatcgaaatgggctgtgacgcggaagacatcgcgctgaccattcatgcgcacccgactctgcacgagtccgtcggtctggctgctgaagtgttcgaaggtagtattaccgacctgccgaacccgaaagcgaagaagaaataatcttctgtaggtggcaatgcgccacccgatacaaaaaagcggctttacagccgctttttttatgcatggcaaatcagatgtgtcaaatgatggcgaaggataacgaaaccgcaaaatttatcgtttccgcagcagtacgtttttcaaagcttatgccgtcggtagtgcctttgtctgtcattttcgaccaactaattgtttcataagaaatacctctccttactttgtcatcatcctgaaattggtaactctataaaataatagtgagctaattatgaggtttgatatatgaaactttttctgacaacagcagcgctaactgcgaccttgatttccggcatgacatttgccagcgatcccgtcatcccctgggcgactaacagcggcggtacggaaagcacgcatattgcggcaatgggcgaggatttgaatgcgcagcatcagcagatcacccacacgcatgaaggcgtatgggcggccaattccggcagcattcaggctgatgaagccgcgctgaccagcaacaagccgccggtacaaggccacccggaattgatgccgcatcagggctaatgatcacggcctggcgataacgccaggcgcttacgggttattcggcgacctgccactgcgcgtctggcgcaaaacgcgtgatagcctgaactttactctccgtctccttgcctaaatccgcctgataaatacgatcgtcctggttgaccataaaactcatcaccccggtttcgccgtaatgcatcggccaggccagaagcgccgcgccgtgaccgtcgttatcgctgataatacggaaatggtagccgtggtaaccctcgtctggcgctgcgggactaaagtttgggcctaacggactggggacgtcgcctgctttggttggccagtacaggccatctttttggccttcgctactgattatcctgtgcgcccagcgatggttttgtaagtaatagtcctgctgcgcatcaacgtaagcatgcatggcctgtaaggtagaaagttcatttcgcccaatagtacgggtgaggatctcattcccggctgccgccatatcaaagcgccagccgccagtctctttcatcatgggcaccgggagctgccagtcttctcgtccgacattcaggtgcgccgtattgtctttctgtacaatgcgatggccttcgcgccagtcacgattgaagcgggccacggcctcgggatcggcaccttccggcggcagaaattgccgccagtcatcgcccagtagcgcggtaagctgcgtttcgttttttccggctaccgccgcggcgaaggcgctggcggccgcttccggggaggggaaccgttcctgcgcgtagcccagcaagggtaacgacagtaacagagcgcttaacataacctttttcattatctgctccggttaacggcgatgaaattcatgatgttcagaaaaatgttcccgcgcggcggcgcgttgctcggtgtttaagtgactgccgcgacggctttccaggccgcgtagctgttgcgattgccatgacggcgatcgactgtcgttcccgctaaacacattggcgtgcatattctggcgaaatgcctgacgctgttgcggcgtagaggattcaatacgctggcgggcggtgtctctctgctgttgtgaaacagggtgctgctgggctttagccttcagctcggaacgatgctgctgcgtggtggatttattcagtgtctgctgcgccgcctcgcgacgactgctgttttgtgttccgtcatagccacggtaattattacgctgggcaatttgatttaactgctgcgatgccgccttacgctgggcatcgcgggtgcctggcgctggcaaagaagcgttggccgtatggctgcgctgttgaaattgcgtcatggccgcctggcgctgactgtcgcgagacactggcgcttgctgcgttgcgcttaacccgccgctaacattggtgggatggaaccgttgcgcaacggtattattcggataggggacgccattgcgccaggcgggattatgctgccagcccatcgtttggcccggcaggttttgcccggatatccggttgaaattattgacattgatgttgatattatcgccattatgttgataaccgttaccaccatgatggtaatcatcatcatggtggtcgtcgtcatggtggtgatgatcgtcatcatcccagtctatgctgctgaacaacgcataggtggtggcgacgcccagactataaccaaaacctttaacaaaactgtcggcaaactgctgccccggagggggcggtaaatacaccggcggataagcggtattgggccaggcgccatacaccgtcgcggggttatagttcggcacgtacaccacctgcggattcgcgggttcaatttttataacggtcgacggtgtcgctggcgtactggcggatgtggtggttgtcgtcgtgacggcggtagaagcgctggacttcggcacgctggtgacggtttgctgtggcgtggattttagcgaaccggtttgttgagcgagcagacgcagcctttgcaccgcatccatcacatcctgtggctgggctaagaacgcatcgcccaggttttgcacccattgcggattctcgcccataagcgccatcaactggggaaaggcgaccagcgatttgacgctggggtcccacggttggctggccaccgcctgaatagcggcatcgccctgcagcgtggggttatctcgcgaccactggacggcctgaaccacgttcgccgggtaggtggaggccatgagcacctgagaaagcagggcatcgggataaagcgcgacaggcgcgacccattgatcaatttgcgcagtggtaaaggtcgttttcgcgacaggcgcgggcacagcggtctgcgtttgctcaggggcgggagtcgccgcctgcgcgggcgcttcgggagcgcggcttttaacatacagtacgcccgaagcggcaaataacccggcactgcacacaagggcaatgagatggggtttaaagggcaacgtcattttatctctcccgattcccgagaatcgctatggtcattatgcctgccgccgacggggtgcagtttggcgtgagtataaagggacgatagtttaatttttagctaatgttgggatcggtaacgttacgtgacgatcaaagcacgaaatgaggtaagcatttatggctgcagctcccgtctcagtagagcattagaccatccttaacgattcagccacttttttatgttgcttttttgtaaacagattaacacttaaagaaaatcctgttattgtgccttatgcggtaccgggcatttaccctactaactactgtctcacaggagcgtgaagagaatcgcccatcaacaaaagcgccgcattatgacaatgagagcgaggagatatcgtcgtgctagaagaataccgtaagcacgtagctgagcgtgctgcccaggggattgtgccaaaacctttagacgcaacccaaatggctgcgcttgtcgagctgctgaagaccccgcctgtgggcgaagaagaattcctgttagacctgttgatcaaccgcgttcctcctggcgtagatgaagccgcttatgttaaagccggttttctcgctgctgtcgcgaaaggcgacaccacctccccgctggtctccccagaaaaagccattgaactgctgggcaccatgcagggtggttacaacattcatccgctgattgatgcgctggacgatgcgaaactggcgccgattgctgccaaagcactgtcccacaccctgctgatgttcgataacttctacgacgtagaagagaaagccaaagcgggcaatgaatatgccaaacaggtgatgcaatcctgggccgacgccgaatggttcctgagccgtccgccgctggcggaaaaaatcaccgtcaccgttttcaaagtgaccggcgaaacgaataccgacgatctctctccggcgccggatgcgtggtcgagaccggatatcccgttacatgcgcaggcgatgctgaaaaacgcccgtgaaggcattgagccggatcagccaggcgttgtcggccccatcaaacaaatcgaagcattgcagaaaaaaggctacccgctggcctacgtgggcgacgtggtgggcaccggttcttcccgtaaatccgcgaccaactccgtgctgtggttcatgggcgatgacatcccgaacgtgccgaacaagcgcggcggcggcctgtgcctcggtggcaaaattgcgcctatcttctttaacactatggaagatgcgggcgcactgccaatcgaagttgacgtttctaacctgaatatgggcgatgtgattgacgtctacccgtacaaaggcgaagtgcgcaatcatgaaaccgatgaactgctggcaaccttcgaactgaaaaccgacgtgctgatcgacgaagtgcgtgccggtggtcgtattccgctgattatcggacgtggcctgaccaccaaagcgcgtgaagcgctgggtctgccgcactctgatgtattccgtcaggcaaaagacgtggcagaaagcagccgtggcttctctctggcgcagaaaatggtcggtcgcgcctgtggtgtgaaaggtatccgtccgggcgcgtactgcgaaccgaaaatgacctccgtcggttctcaggatactaccggcccgatgacccgcgacgagctgaaagacctggcctgtctgggattctccgccgatctggtcatgcagtcgttctgtcacaccgcagcctatccgaagccggttgacgtcaccacgcaccacacgctgccagacttcattatgaaccgtggcggtgtctctctgcgtccgggcgacggcgtgattcactcctggctgaaccgtatgctgctgccagataccgtgggtaccggcggcgactcccatacccgtttcccgatcggtatctccttcccggcgggctctggtctggtggcgtttgccgccgcgaccggcgtgatgccgctggatatgccggaatccgtgctggtacgcttcaaaggcaaaatgcagccgggcatcaccctgcgcgatctggtccatgccatcccgctgtacgccatcaaacagggcctgctgaccgttgagaagaaaggcaagaaaaacatcttctctggccgcatcctggaaatcgaaggtctgccggatctgaaagtggagcaggcgtttgagctgaccgatgcttccgccgagcgttccgctgccggttgtaccatcaagctgaacaaagagccgattgttgaatacctgacctccaacatcgtcctgctgaagtggatgattgcggaaggctacggcgaccgtcgtacgctggaacgccgtatccagggcatggaaaaatggctggcggatccgcaactgctggaagccgatgctgacgcagagtacgcggcggtgatcgacatcgatctggcggatatcaaagagccaatcctctgtgcgccgaacgatccggacgacgcgcgtctgctgtctgacgtgcagggcgagaagatcgacgaagtgttcatcggctcctgcatgactaacatcggccacttccgtgcagccggcaagctgctggacaaccataaaggccaactgccgactcgcctgtgggtggcgccgccaacccgtatggacgccgcgcagctgaccgaagaaggttactacagcgtgttcggtaagagcggtgcgcgtattgagatccctggctgttccctgtgtatgggtaaccaggcgcgtgtggccgacggcgcgacggtggtttccacttctacccgtaacttcccgaaccgtttaggtaccggtgcgaacgtcttcctggcttctgcggagctggcggcggttgcggcgctgatcggcaaactgccgacgccggaagagtaccagacctacgtggcacaggtggataagacggcggtggatacttaccgttatctgaacttcgaccagctctctcagtacaccgagaaagcggacggcgtgattttccagactgcggtgtaacagagacgggcccggatttccgggcccgaatggcgcttcttatttattattacgcttcacttcccgtagccccggcaaatacgtaattaccccgcccattattgccccggctacaatcgctggaataagcataatcaatacttcaccatatattaatggtagtatgcttatgtcaaaaccatatcgcaccaaattaaacaacgtcgtgatcagaccgcctgcaatggcgcaaaggatcatcctgttaattattttttgatataatttcaggggtatcagcgcgcaggcgacaccggttaaccatgcggggaggagactgtatatccagccggtaataatcactaattctggtattgttctgcagaaatacaacaaaaatgagtctggtccgccaataatggcgggtaaaaagtttatgatacctatcgcgatggctgcgcctattaacgggccaaacagaataaaccaaccgctatgataaattattcgtcgaaatacagacataatgtatccttcctgaattttccttcaaccgtctgacaaaaaatacaactcactacggcttctctgctgatatcgcccattgctggagcttagttgaaaagcgcttatcaagtagccaacaatttcatgacaacgacccggatgataaggaagcgtctgaaagactagcaggcatcggcgtggcagggtattgatgatttctgaaaaaaaacgccagagggacaccgggctggtaatgctataactggatgaggggcagccatttttaatgactgcgctcttccggcgcataataaaaggtcatctaaacggcgcgctgtctgatgtgaaatttgtcgtcgagttttcgcttaacggagattaagtgaatgtaaacgtgatgggtgagggaaattttcttgcagctatcggtaatgcctatatccccagcacttccggcaccagctcttccagttgcctgaccagctcagggtccatatagcggtagtcatcggggatatcgagtacgtgcaggggcttattttcaataatacgacgatattcagccatcaaccggtctttatgtttctgctccataacgcagataacgtcagcccactgaagtaacccgcacgacacgctttttttggcgttgcggctggtgccagcggaacggacgctaaggccaggatagcggcggaacacctgctccgccgtggggctgcgccattgatttcggctgcatatgaaaagcacattcattaaataaatactcttccagatcgcgcttcgctaacggcgagtttgtgaatcgtggagacttaataccccacggtgcggcacgtagcactttgtcggagtgcgtgtagatatattgaagcgctagagtgactttctgtatgaataataaactgttttggcatttttattttatcttttgtgcgccccgctgtttttctttcaccgtgctgcgataattaccttaaggcgcaatgcggtattggcgcattgtcagggcagaggaaaacaattatggattacgaatttctgcgcgacgttaccggaggggtaaaagtacgaatgtcgatgggccacgaggtggtcggtcactggtttaatgaagaggttaaagacaacctctcgctactggatgaagtagaacaagccgcgcgtacggtcaaaggcagcgaacgctcctggcaacgagcagggcatgaatacacgatctggatggacggcgaagaagtgatgattcgcgccaatcaactggatttttccggcgatgagatggaagaggggatgagttattacgatgaagagagtttatccctgtgcggcatggaggattttctgcgggtcgtcgccgcgtatcgggaattcgtcagtaaagcctgaccctctcttcgttattgtcccacaacgccagtcgacggacagttgggggcggtagtggaaacgaagtcgccaaacattccagccgggagtatcccggcttttttatagcagaatgattttttgatttttattaatcattttaaaactgtgatctgacgcgtttgtgatcttaatttgattgaatataatcgttatgattttattcaatcacaacaagcaacaggcggtaagaccatgaacatcaaaaaagcaatagagcgcgtacccggcggcatgatggtcgtaccgctcgttattggcgcagtcattaacaccttcgccccgcaggcgcttgagatcggcggttttaccactgccttatttaaaaacggcgcggcaccgctgattggcgcttttctgctgtgtatgggagccggtatcagtgtgaaagccgcgccccaggcgttattgcagggcgggacgattacgctcactaagttgcttgtcaccatcggcattggcctgggcgtggagcatcttttcggcgcggagggtatttttggcctgagcggcgtggcgattatcgcggcgatgagcaattcaaatggcggactttatgctgcgctggtaggcgaattcggcaatgagcgcgacgtcggcgctatctctattttgtctcttaatgatggccctttctttacgatgattgcgctgggcgcggcagggatggcgaacattcccattatggcgctggtggcggtgctggttccgctggttatcggcatgatcctcggcaatcttgatcctcatatgcgcgattttttgactaaaggcggcccgctgctcattcctttctttgcttttgcgctgggggcgggcatcaacctggaaatgttactgcaaggcggacttgccggaattctgctcggcgtgctgacaacgttcgttggcggtttctttaatattcgcgcagatcgtctggttggcggaactggcattgccggggcggcggcctccagcaccgcgggtaatgccgttgcgacgccgctggctattgcgcaggccgacccttcgctcgccgaggtggccgctgctgccgctccgctgattgccgcctcggtgatcaccacggcaatcctgacgccagtgttgacctcctgggttgcaaaaaaacaggcgcgtcaggcttctttggagaaaaacgcatgaaaatgatggttatcgccgatgattttaccggatcgaatgataccggcgtccagttggcgaagaagggggcgagaacggaagttatgttgagcgcgtcgcaaaaaccgtcccgccgcgccgatgtgttagtcattaacaccgaaagccgggcgatgcccgcagatcaggcggcatctgccgtttatgccgcgctttccccgtggtgtgagacatcgccagcgccgctggtgtacaaaaaaatcgactccacatttcgcggcaatatcggcgccgaagtgacggcggccatgcgcgccagtcagcgaaaactggccgttatcgccgccgcgatccctgcggccggacgcacgacgcttgaaggaaaatgtctggttaatggcgtcccgctactggaaaccgaatttgccagcgatccgaaaacgcccattgtctcttcccgcattgccgagatagtggcgttgcaaagtgagatccctgtgtatgaagtctttttgcaggatgtccgacgcggcgggttaagcgccttacttacggcttatgcggctgagggcgaagggattatcgtcgtggatgcggtggaagagcgggacctgacgttgattgcgcaagcggcgtgtgaacaaccgtcgatgccgctgctcgtcggcgcagcgggtctggcgaatgcgttgccggttgaactttttatgcaagaccggcagcggctgccggtgctggtggtggccggttcgatgagcgaagccacgcgacgtcaggtggataatgcgctgtgccggggacgtgcggaggtcgtggatatcgatgccgcgcgcatggtgtcggatagcgcggaacaggaaatcgcgtctgtcgtagagcaggcctgcgcgctgttaagtcagcatcgacatacgattttacgcaccagccgtcgcgcagaagatcgacagttaatcgacgcgttgtgcgaaaaatccgcgatgagccgtcagcaattgggcgagcgactgagccagcggcttggcgtcgtcacgttaaacattatcgagcaggcgcggattggcgggctgtttctgactggcggcgatatcgctaccgccgtcgccggcgcgcttggcgctgaaggttatcgcattcagagcgaggtggcgccctgtattccctgtggaacgtttgtaaacagcgaaattgacgatctgccggtcattaccaaagcgggcggattcggttcagacagtacgttgtgtgacgcgctttattatattgaggagatgtattgtggagactaaaaccgttgccattaccatgggcgatccagcgggcattgggccggaaattattgttaaagcgctaagcgaagacggtctcaacggcgcgccgctggtggttattggatgcctcgcaacgttgaaacgtttacaggcgaagggcatcacgccgaacgtcgagttacgggccattgaacgggtcgccgaagcgcgttttgcgcccggcatcattcatgtgattgatgagccgctggcgcagccggaggcgctggaggccgggaaagttcaggcgcaggcgggggatttagcgtatcgctgcgtgaagcgcgccaccgagttagcgttacggggcgacgtacaggctatcgctaccgcgccgctgaataaagaggcgctgcacctggcggggcacaactatccgggccataccgagctgctcgcgaccctgacccatagccgcgattacgcgatggtactttacaccgataaactaaaagtgattcacgtttcaacgcatatcgcgctgcgtaaattccttgatacgttaagtaccgcgcgtgtcgaaacggtgattggcattgctgatactttcctcaagcgtgtgggttacgttaaaccgcgtatcgccgtggcaggcgtgaatcctcatgcgggcgagaatggcctgtttggcgatgaagagacgcgtatcctgacgccagccattaccgatgcccgcgcaaaaggtatggacgtttatgggccgtgcccgccggatactgtatttctccaggcttatgagggacagtatgatatggtggtggcgatgtatcatgaccaggggcatatcccgttgaaattgcttggcttttatgatggcgtgaatatcaccgcagggctgccgtttatccggacttctgccgatcatggcaccgcatttgatatcgcctggacgggaaaagcaaaatctgagagcatggccgtatcgatcaaactggcaatgcaactggcataattccctgttatgaaaggacaacaccgtctggatctcattgtggcgtatctgaaaaaccatacgctggttacggtagaacagctggttgaggcggttgacgcatcgccagccactatccgtcgcgatttgatcaagctggatgagcagggcgtgatcagccgtagtcatggcggcgtggcgctgcggcgttttgaacccgcccagcccaccaccaatgaaaaacaactgcgatcgcccgctgaaaaacgggcgatcgcacgcgttgccgcatcgctggtcaatgctggcgatgccgtcgtgctggatgccggtacgacaatgatggaactggcgaaatgcttaacccatcttccgctgcgggtcatcaccgtcgatctgcatattgcgctgtttttagctgagttccggcaaattgaagtgacgattgtcggcggtcgtatcgatgacagcagtcagtcctgtatcggtgagcatgggcgcaagctgttgcgcagcgtttacccgaacatcgcgtttatgagctgtaattcatggggggtaaaaacgggcgtgacgaccccaacggaagataaggccgggcttaaacaggagattattgctaatgcgcagcgcaaagtgttgctggcggacagcagtaagtatggcgcgcattcgctctttaatgtggtgccgcttgagcgctttaatgatgtgattactgacgtcaatctgccgccgtcagcgcaggttgaactgaaagggcgcgcttttgcgctaacgctggtgcagccggagtgacagcgccgtcaggcgctgccagtggtgaatcagaccgcagaaatattgcggccgtagtaaatctcgcgcatctctttccacagcgcggcggtgatctgctggcgttcggtttcagtgagatcttccggtttggtgtgaaacatgtagtgcttaagatcgaactctttaagcagcatcttggtatggaaaatattttcctgatacacgtttacatccaccatgtcatacagcgatttcatatcttccgacataaaattctgaatagaattaatctcatgatcgataaagtgtttcataccgttgacgtcgcgcgtaaagccgcgcacgcggtaatcgatggtgacaatatcggactctagctggtggatcaggtaattgagcgcttttagcggtgaaatcaccccgcaggttgacacttcgatgtcggcgcgaaaggtgcaaagcccgccttccggatggctttccggataggtatgcacacagatatggctcttatcgaggtgcgccaccacggtttccggcagcgggccgggatgttcggtttggtcgataagtttcgggtcgactggctcttcgctcaccagaatcgtgacgctggcgccctggggttcataatcctgtcgggcgatgttcaggatgttcgcgccgataatggagcaggtctccgacaggatctcggtcagtcggttggcgttatagagttcatcgatataggcgatatagccatcgcgctcttctgcggttttggcgtagcagatatcgtaaatacaaaaactcaggcttttcgtcagattgttaaagccatgcagtttcagctttttcaatttttatcacctccttaacgtcactgtgcggacagtgcgtcatgtagatattgcggtagcgcaaatgcagcggcatgaatagccgggttgtaatagcgacatttgaggccggcggcatgaaaacgcgcctgaataatttcgctcgacaggtgacgaagagcgtcgttgtccgtcgcccaggcgaaggtcatgatgccgccgtagtaggtcggaatcgccgcctggtagaagccgacatcgctgaagtaatgactcagctttcggtggctgtcgagcgcttcatcctgttgcaggaagcacacgccgttctgggcaacaaaaatgccgcccggattcaggcaacgcttacagccttcataaaaggcggaggtaaacaggctttcgccggggcctatcggatcggtacagtcggaaatgatcacatcaaaggtctgatgggtctgattgacgaaattcacgccgtcgtcgatcactagcgtaaagcgcggatcgtcgtagctgccggcattgtggttgggtaaatactggcggcaaaacgagactacgccagcgtctatctctaccatggtgatggtttcgacgtttttatgccgggtaacttcacgtagcattgcgccgtcgccgccgccgataatcagaacgtgtttcgcatgaccgtgcgccagcaacgggacgtgggtcatcatttcatgataaataaactcgtcgcgttcggtggtctgtaccacgccgtccagcgccatcacgcggccaaaagcggcgttttcaaagatgattaaatcctggtgatcggttttttcatgatacagaacgttgtctacggcaaagtactgaccaaactggtcgtgtagcgtttcatgccacatcgtattttcggccattggctgatacctccattgttaacacccgtaaaaaaagggcgcaacatcatagctaacaatgaccgtggatgcacggtcattatttcagcaataggatcacggaggattatttaacgtaggctaacaggctcagagaatcgcgggccaaagctttgcattttttagcgaccggaataccgatgccgctaagatcgcggtagctgtcttcgcccaacgatttcatatcgaaggtgtcgtagttactcaggtcccactgattttgctgggcaaaaaagaccagcgcacgccgaatctgactgttgggtaaattttggtaaccacagtcatttttcagaaaaacgaaaaccgccgttaaatcggccatatcttcagcttcggattcagtaagcgcatagctatttgcgcataaggccatcaggctgccaaacaacacgggtctgaaaaacgtcttcattgcttctaccacggcatcagggaaagtcaacgttagcatactgagaacgtagcgacgacttttattatcaggattggtcgcggcgttttcattcttattgtattgctgtcaggaatggtaaagacgtgttgctggcttgaccttcccgttagggcagggtctaagcttagacacccgcctgttcattataaggaaatgattatgttacgccgtgatttcttaaaatattcagtggcgctgggggttgcatcagcgctgccgctgtggagccgcgccgcttttgccgccgaacgtcccgcgttgcctattcctgacctgttaacggcagatgcgagcaaccgtatgcagttaattgttaaagccggacagtcgacattcgccggtaagaacgcgacaacctggggctacaacggtaatttgctggggccagcggtacagcttcacaaaggaaaaagcgtgaccgttgatatccataaccaactggccgaagacacgacgcttcactggcatggtctggagattccgggcatcgtcgacggcggtccgcaggggattattcccgcaggcggaacccgcacggtgacgtttacgccgcagcaacgcgccgcgacctgctggattcatccgcacaaacacggcaaaaccgggcgccaggtggcgatgggccttgccggactggtgctgattgaagatgacgagattcgcaaattgcgcctgccgaaacagtggggcatcgacgatgtgccggtgatcattcaggacaaacgcttctccgccgatggccagattgattatcaactggatattatgaccgccgccgtcggctggtttggcgatacgctgctgaccaatggcgctatctatccgcagcattccgcgccgaaaggctggctacgtctgcgcttgctaaatggctgtaatgcgcgttcgctgaatatcgccgccagcgataatcgcccgctttatgtgatcgccagcgacggcggcctgctggcggagccggtgaaagtcaccgaactgccgttattaatgggcgagcgttttgaagtgctggtggatatcagcgacgggaaagcctttgacctggtgacgctgccggtcagccagatgggaatggcgatcgctccgtttgataaaccgcatccggtgatgcgtatccagccgctgcggattaccgcctccggtacgctgccggatacgttgacgacgatgctggcgctgccgtcgctggaagggctgacggtgcgcaacctgaaactgtcgatggacccgcgtcttgatatgatggggatgcaaatgctgatgaagaaatatggcgctcaggcgatgagcggcatggatcatgacagcatgaacgcgcatatgcagggcggcaatatggggcatggcgagatggatcatggcaacatggatcacagcgggatgaatcatggcgcgatgggcaatatgaatcacggcggaaaattcgacttccataacgctaactttatcaacggccaggtcttcgatatgaacaaaccgatgttcgcggcgcaaaaaggccgacatgaacgttgggtgatttccggcgtgggcgacatgatgctgcatcctttccatattcacggcacgcagttccgtattctgtcagagaacggcaaagcgccagcagcgcacagaacgggctggaaggatacggtacgcgttgagggcggtatcagcgaagtgttggtcaagttcgatcacgacgcaccgaaggaacatgcctatatggcgcactgtcatctgttagaacatgaagatacgggaatgatgttaggatttacggtctgaccgatgtctgtgacgcaggccgggtaaggcgaaaccgccacccggcacaatgcccggcatacgccgggcattaatggttatttcgcgtcgtcaggcaaagcataggccacgatatagtcgcccatcttcgtaccaaacgaaccgtggcctccggcagaaacgaccacgtactgcttaccgtttacctcataggtcatcggcgttgcctggcctccggcgggtaaacgtccctgccacagtttttccccgttgctcatgttataagcgcgcaggtagttgtcggcggtcgcggcgataaacagcacgttaccggcggttgagattggcccgcccagcattggcatccccatgttgaacggcaccggaaccggcatcgggaacggcatactgtcgcgcggcgtccctatacgtttcttccacacgatttcattggtcttcagatccaacgcggaaatatagccccaggccggttgtttacacggcaggccaaacggcgaaaggaacggattcagcgtgacgccgaatggtacgccgtactgtggctgaatacccgcttctgtaccagtacctttcgcgtctttcggcggctccatcggattacccgggccgcgtgggatcagcttcgagacaaacggcagcgccatcgggttagcgatagcgacctgacggtctggatcgacggaaataccgccccattcaaacatccccaggttgccagggaataccaatgttccctgctcggacggcggggtgaagataccttcatagcgcaactggtggaacatgacgcggcacaccagttggtcgaacatggtcgcgccccacatatccgcgccggagagatcttttttcgggcggaaggttaaatcagagaacggctgagttttggcgacgtaatcgccttttgccgcgccctgcgggaccggtttttccggggcgggcacgaccagctcgccattacgtctgtccagcacaaagatattaccggttttcgctggcgcatagataaccggaacggtagtaccgtcaacggtaatatccgccagcgtcggctgtgccggcaggtccatatcccacagatcgtgatggacggtctgataactccaggccagtttcccggtggtggcattcagcgccaggatggagctggcataacgttcctgctccggcgtgcggttaccgccccagatatccggcgtggtcacgcccatcggcagatagaccagatccagtttcgcatcataggcggcaggcgcccaggagttcggcgagttaaaggtaaaagcgtgctcatcggctggaatcgcgttcggatctttcgcccccggatcgaaggcccacagtagtttaccgctattaacatcaaaaccacggataacgccggacgtttcgcgggtagagaagttatccgtgaccgaaccggcaatgacaatcgttttatcggtgataatcggcggcgacgtcggttcatacagtcccggcgtggtgtccggcatattggtttgcagattcaggacgcctttgttggcgaaggtttcacacagcttgccggtttcggcattcaccgcgaaaaggcgaccgtcgttgaccgggaggataatacggcgcggacagtcggcgatgacctccggcgaggcggtatccgctttggcctcatgataagagacgccgcggcaggtcacatgctggaaagacgaatcggtcttcaactgaggatcaaaatgccacttctctttaccgctggcggcgtccagcgcgaacagacgctggtgagctgtacacagataaagcgtatcgccgactttaatcggggtcacttcgttggtgatttcacccggatcgttgggttgtttcagatcgccggtgcggaagacccacgcttctttcagttggtgaacgttatccgcagtgatctgtttcagcggcgaatagcgttggccttcctgattacgtccataggccggccagtcttcgtcggcgatcgacgaacttgttgcggcgggcgtggcgtcggcgcgaagcgtaccgttgatctcctgcgggtcgttgaagccggcccaggtcagaatgccgccgctaatcagcaacgccacgaccagcgccgccactgcgccactggaaggaaccaccagccgatgccagacaaacggtaatattagccagatgccgaaaaacaccaggatatcgctacgcggcgtgagcgcccagaagtcgaacccgacttcccacacgccccaaatcattgtcgccagcagcagggcggcatacagccacagcgcggcacgtttactgcgccatagcaatccggccacaaccagcatcacgaggcccgcgatggggtagtaccaggaaccgccaatagcaaccagccagacacctccgataagaagatacagcccacaaagtgctgcaaagagggccgtcagcgtcacgagtaatcgtggcgatcgtgcgttattttctgccataaaaagacaccatcccaaattgttaattttttagtagcaattaagtataggaattaacatgtgtgatcgtcatcacaaaatgagctttcttatcaaatgccgcgaatgaatacgtttgctgttatactgcgtgccttgcgcgtcaatgcggcgttattagtcaccggcattgagtgatttgtttttaaatcatatggttataaatatgaaacatactgttgaagtcatgatccccgaagcggagatcaaagcacgtattgccgagctgggtcgtcagattaccgaacgttataaagacagcggcagtgaaatggtgctggtaggtctgttgcgtggctcatttatgtttatggcggacctgtgccgtgaagtccaggttcctcatgaagtcgattttatgaccgcctccagttatggtagcggcatgtccaccacacgcgacgtgaaaatcctcaaagatctggatgaagatattcgtggtaaagacgtgctgattgtcgaagacattattgattccggtaatacgctgtcgaaggtccgtgaaatcctgggcctgcgcgagccgaaatcgctggcgatttgtacgctgctggataaaccttctcgccgcgaagtggacgtgccggttgagttcgttggcttttcgattccggacgaatttgtagtcggttacggtatcgactacgctcagcgttatcgccatctaccgtatgttggtaaagtggtggtgctggacgagtaagcgcagaaatgccggatggcgtcgctaaagcgacttatccggcctatagctaatggcttattggtggggaatgtatttcagacttagggcggaaatacccttatgatagccgttctccagcgtttctctgttggtggcggtgacgtcaagatcgcgcagcaggccatcattgatactgtacgcccagccgtgaatggtcacattctgaccgcgtttccacgctgactgcataatggtggaatgccccaggttatagacctgttccatgacgttcaattcatagagcgcgtccagacgttgctcttcgggcatttttcccaacagcgagctatgtttaagccagatgtcgcggatatgcagcagccagttattaatcaagcccagctcagggttttctaccgcagccttgataccgccgcaaccggagtggccgcaaatgataatatgctcaacttccagaacatctaccgcatactgaaccacggagagacagttcagatcggtgtgaataaccaggttagccacattacggtgaacaaacaattcgcccggttcaagcccggttaaacgctctgcgggaacgcggctgtcggaacatccaatccatagaaagcgcggtttttgcgcttgcgccagtttctcaaaaaatccggggtcctcttccaccagcatttttgaccatagtgcattgttgctgatgagtgtatctatgtctttcatggaagttaacgacctgtaaccaaataagtgcgttgggctaatatagggcaactccgtaattatttaaaccatatataaagtgtaagaacgtaaagtaagtgagaatttatgaccattgcgctggaacttcaacaacttaaaaaaacctatcccggcggcgttcaggcgttgcgcggcatagatttgcaggtcgaagcgggggatttttacgcgcttctggggccaaatggagcagggaaatcgaccaccatcggtattatcagctcattggttaataaaacgtccgggcgcgttaacgtttttggttacgacctggaaaaagacgtggttaacgccaagcgacagcttggactggtgccacaggagtttaactttaacccgtttgaaacggtgcaacagatcgtagtgaatcaggcgggttattacggcgtggaacataaagaggcggttttacgtagcgaaaagtatttaaaacagctcgatctgtgggaaaaacgtcatgaacgcgcgcggatgctctccggtgggatgaagcgccgcctgatgatcgcccgcgcgctgatgcatgagcctaaactattgattctcgatgagccgacggcgggcgtcgatatcgaattgcgtcgctcgatgtggggattcctgaaagacttaaacgccaaaggcaccaccattattctcaccacccactatctggaagaggcggaaatgctgtgccgcaatatcggtattattcagcacggcgagctggtggaaaatacctccatgaaaaatctgctttcaaagctgaaatcggagacgtttattctggatttagcgccaaaaagcccgctacctaagcttacgggttatcaatatcgtctggtggatacctcgactctggaggtggaagtgttacgcgagcagggggttaacagtgtctttagccaactgagcgagcagggggttcaggtattaagtatgcgtaataaagccaaccgtctggaagaactgtttgtgtcgctggtgcatgaaaaacaaggagatcgcgcatgatgcagctttactgggttgcccttaaaagcatctgggcgaaagagatccaccgctttatgcggatctgggtgcaaacgctggtgccgcccgtcatcaccatgacgctctattttattattttcggcaacctgattggttcgcgcatcggcgaaatgcatggttttagctatatgcaatttattgtgccgggcctgattatgatggcggtcattactaactcctacgcgaatgtcgcgtcgtcattttttagcgccaagtttcagcgcaatattgaggaactgctggtcgcgccggtaccaacgcatgtgatcatcgccggatttgtcggcggcggcgtagcgcgcgggctgtgcgtagggattctggtgacggcgatttcgctctttttcgtgcctttccaggtgcattcctgggtatttgtcgcgctaacgctgattctgaccgcgattctgttctcgctggccggactgctgaacgccgtgtttgcgaaaacctttgacgatatcagcctgatcccgacctttgtgctgacgccgctgacctacctcggcggggtattttactcgctgacgctgctgccgccgttctggcaagggctgtcgcacctgaacccgatcgtctacatgatcagcggcttccgctacggcttcctgggtatccatgatgtaccgctggtgacgacgtttggcgtactggtgatctttatcgccgctttctacctgctgtgctggtcgctgatccagcgtgggcgcgggttgcgcagttaagcgctgactggggagatggggcgttgggttgcacttcgcttcaccccatctacgggcccgtaatatcaatgggttacggggctgtaggtgggagggcttgctgaaacccaacgcttctctcagcgaatctgaatctccagcgtggcggtagcctggtattctccggtgtggggaacatgtccggtggtattgaccggcgcggcggtgaactcggtgctgcctttaccgtcggcgtaatcttcaatcggcaattcggcgctgccgccgggaacgatggtattatcgtatttatcggaaatccgtatccccaaattctcattgtcagttttcaggtagtccgggttgtgcggatcggttgcgccatttaatgacatcgacaggttggtgccgtccgccacgttactacaggtaaagtttacctgagtggtgacgtgcgagttctgcggactgtcgccgaggtgacgaatatctttgccctcaatatccggtagcctgacctcgataacctgcccggcgttgatggagcaggactgcggcacggtaatggtcccggacatggtgacgtgcgccatcggtggaacggaagggggaatattatctccgctgctgcccggcgtttttgacaaatagagattcataatcgtcgtctcaggaatggtgatttcacctaccagtgggtgagtaatataaatacgcacgttacccttattccctgcggacattttgtttatgtccgcgcccgtacacccgcctgcggtggggtcctgattactgatcgctgaaaagggaacggggatatactgtttcaggttaccgacgatgtaggtttccgtaccaatctccagcttacccgcgaccagaacataaaaatccatctgttgcccattgctacccgcttcgctgtacgttcctttttgtgttaaatcgccggtcgtggcggtgaaatagttaacgccctgataatctttattatcgcagtcgcacctggcgctgtattcgccgccgaccgaccaactctctttgactattttccctgcctggttctcatccgtatcggtaatggtctggtcaaggggaaaaaagaaattatgcgtgccgctggtgggttgacaccagccgcttccgttgcccatcgttccgtctgccagcgcatggcctgaaaatagcgacagcgccagcagcatccataaattcttcattgtgttcctcactggcagacggcgttcgccatcactatgccgttcatatttttgctgatatccaggtggtaatccgcgcggcaagaggcgcttccccagttcaccagcagcaggccctcttccggcaggccgctgaggaagacctggcctttatcgccgacgatactggccaggttcgcatcctgcccatcgacgcttgccgtcgcgccaaagggcacgggctcgccattgctgcgcgtcagcgttaacaacacgcgatagcccttatgcgtgtcatacgccgcgcgcaccaccgcattacgcgtcgggtagacggtctggttgttgagcggaatatccacgttgtcagcaaacgtgctgctgtcgagcgagatatcgtagcgataatacggcgtgacgttggggatcaccgtataaccccggaagtcggtggcgacgccggtctggttttcaaccgaaacgccgctggcgccgggcgctttaattaaaatcgccgcgccggtaatcggctggctcagggtaataccgttttcgtgcgccagaatgccgccgctgatgccgtagctgacttgttggctatctggcgactgattgtaaccggcgttgaggttggcataagtgcctttatagctggcgtttaccccgccggaatcaccgtcttgtgtgctgtggctttgctgtaacgaccagttcaggtttctgtcacgcagcgcggtgccgctaagggtggtgctgttcaccgtggcatcgtgcttacgcgtgttcagcatatagctggcgtatagcctggaatcgaacaccgtaaacggaacgtgcagcgacagcgtgaacagccgatcgttctggttataacgatcgtcgtcgttgtcatcatcgtcattgtccgaacggtactggtaggtgtttttgttatagctgtagctcagcgtatagctcaccggaccccagctattgttgtagctggcgctcagggattccatctgctgcgcgctgtgccagtaatcttctttgacccaacttagcgttaaggaaccgagcgtattgctaatttgctggttgaccgaagcttcgaaacgattatggcgcttgccgtagttatcataaaaatcgtcgtccgggttgatcacctcgctcagcgaattgtagttttcgctggcgtaacgatagccggccagcgaaaacgtggtgcccgtactgacgacgcccttgctgtagcggacgcgccaggattgcccgatttctttgcggccatagtcaaatttggcgtgcgaccagatgccgtccagggaaatggcccccagcatctgcatattttgcccgacgccgaaggcgacggactggtatttatcgccggcaatctggctgccgccgtacagggtgatgccccacggcaggccgtacagcagggtcgcctggccgaagtcgtccagcgtgtggttgttataatcgcgatatttacccacggtcacgctgtattttgcccgtccggtgcgctgcagaatcggcagcgaagagtagggcacgataaagtgctgttcgctgccgtcggtttcttttaccgtcacgtcatagtcgccgttgctgccggtgggaaacatatcgttgatttcaaattcgcccggcgaaacggcggtctgataggcgatatagccgttttgccgcacgataacctgcgcgtttgagcgggcgatgccgcgaatcgtcggggcgtaaccacgctggctgttgggctgcatttgatcgtcagaggtgagctggaggccgcgaaaaggtacgctgtcgaacacgtcggatggcgtattgctgtctccggcggtgaactggcttttcagcgcgataatgtcgcgctgtaaatagttataaacgctgttccagctaccgctctcgccgttatttgaactccagttactgtagttgcgaaaacgccacggcccgaggttaaaacccggctggagagcgagatacttcgattccgcatcgtcggaatcctcactggaaccgtactctttatagccgctgaagctgtagttcagcatcagcgcggtaatcccctcctgccacttttccggcggtacgtagccgcgtgcgttgttggcgatgtagagttgcgggatgcttactgataatgcctgttgctgaaaatcaaaccgctggctggcgccggggataacgctgagatcgacgcagcctttttcactctccagcgttggaaaaaggtcggttttgacgccgttatcttttagttcctggagccgtaaacagccctgtaatgcctgttgaccgtcactgagcgtcgcgagttgaaaatcaacgtttcgtgcgccgatttctgttttattgatattgatagtgacgtaataggtgccaggcagctggcttttgtcgttatcaaatgtcgacagatcgacgcttgtgcgactcgcctgcccatggttttcaataaatgccggattgaaatagtcgcgcgcccatgcaacgtgtgtgaacgtgctgcccagcgcgatacacacagcgcagcgcgataaataaaatacccggtgttgccttttgcgcatcggcactctcatccctgtcactcttctcaaggcgtttgtttatgttcggggccagtaccgccaaaatcgttgatgatagaccaggcgatcgggccgctggcggcggcaggcagcgtgtactgcgcgttgccgaaaggcgccacatagcgcggggctttcactttttgactgccaacggaaagggtggcgaagttcatataatagggcgtggggttcttcacggtgagcgtgcgaccctgacgcgaccacgttaatcgatcggcaacctcttctggtttttgggttaacgcttttggccggtaaatcagcttaaattccgctttaacggccagcatgagtgtgttgtgtttattgtccggattgctgctgggaatcgatttaatatccagccagtacatcgactcgcgatcttccggcaaattaccgccggtacggataattcgcagtacgtttttttgcccgccattaaggcgaaaaagcggcggggtgaccataaacggcgcatcaccgctcgccccggtttcactgatcgattgcgcccaggactgaattaaatagggaacgttgtcgctattgcttatcgatatggacgcatctttggcatcgccgtgaaaaataacccgcgttgtgccgatgtttatccctgcggcatgcgccagcgaaccgcacaacaggcaacaaagcaaccctgctttagccaatgaattcattgatgacctcaataaacaaaggggccagccgacgctggccaccaggatcagttatattgcagatagaatgttgcggttgcatcgaccgttcccgacttaacgggaaccgcggtggcgatatagcgggcggtgaaaggcattgagagttccgtcaccccctctgctgtagggagcgcgactgcggcagaccatgcctgaagatcgttaaaggtcataggggtgctagttttatcaagaatttgcacgccaatattctcagcatcatcctcatttttcaggatggtcgcatcggttccgtcgagtgtgccttcaaagcgcgcctgtacactgctgtagacgtttgcgtcgcagttttcgagttcgatggtgaagtctgtatcccctgccgtctgccctgcggcagtgaaaagagaggcaaattcttcctgtaatgtcacctctactgaatccgtttttaccgtacaggcgttttgcttaatgaggccggtgatatgtacggtgccgtctttggcggtgtctgccagcgcggcgggggagagggtgatggcggccagtgccacagtgagtgtttttaaggagagtttcattatctttgatcctttaagatattataaatattgacatagtaacaatatctatagtgtggaaagttattgttctttttattcccgaatgagtaaatataatgtccgatgatttttacggcgcgaagaaaaattcagaatacataaatatgaaatatttataatatatatttaatcaattattttggtgagtgtttgtttaattgaatcgccgtgattaccctttaatgggccagattctatgaaggctgctaacaattttaaaaataatgcaaatttttttgaataaaaaatgatcgtggtcatagtgtgttgtcggccaaaaaaacatgctgacatcatgcaggattggagctcaatggaggagaagttatgctgggatgggtcatttcctgtcatgacgatcgggcgcaggaaatgctcgaaggtcttgaaaagaagtatgggccgttggcgcagtgtcgggcggtcaatttctggcgtgggttaagcgtaaatatgctcagccgcatgatgtgtgacgccctccatgccaccgactccggtgaaggcgtgatatttttaaccgacatttccggcgcggcgccttatcgtgtagcgtcgctgatgagccataaacattctcaatgtgaagttatttccggtgttagctattcattgatggaggaaatgattacctggcgagagtcaatgagcagttcagcatttcgcgaccagattgtcgcgcttggcgcgccggatgtcaccagtctctggcatcagcagcagaaaaatccgccttttgtattgctgcatgattcgtatgagttttgatcaataccattgacgacgcttttgctacaatgacggcgttttttcgcctcggttatgatatatggttatgcgcgttgttcttatcttgctgttctttttcgccggtaatgtgttggctgccttgcccgctcgttatatgcaaacgacgaaagatgccgccatctggtcgcagattggcgacaaaatggtgaccgtagggaatatccgcgccggacaaattctttccgtaacgcctgttgcggctgattattatgcctttaaattcggcttcggtgtgggctttatcgataaaggccatctggagtccgtgcagggaaaacaaaaagtggaagatggcctgggcgatcttaacaagccgctcagcaatcagaatctggtgacctggaaggacacgccggtgtataacgcgccggacatcagtagcgccccgtttggcgtattggtggataatttgcgttaccccattattagcaagctgaaaggccggctacatcaaacctggtatcagatccgtattggcgacaggctggcttatgtcagcgccatggatgcgcaggaagacaacggcattccgattttgacctatcatcacatcttacgtgatgaagagaatactcgttttcgccatacgtccaccacgacttcggttcgggcattcagcaaccaaatgacctggcttcgcgatcgcggctatgccacgttgacgatgtaccaactggaggattacatctataaccgcgctaatttcccggcgcgcgcggtggctatcacctttgatgatggccttaaatcggtgagtcgctatgcgtatccggtattaaagcagtacgatatgaaagcgacggcatttattatctcatcgcgtattaagcgccatccgcaaaaatggaatcccaggtcgctgcaatttatgagcgtgtccgaattgcgcaagataagcgatgtttttgattttcagtcgcatacccattttttacaccgggtagacgggcatcgccgcccgattttatatagccgcagctaccataatattctgtttgattttgaacgttcgcggagggcgctcacacagtttactccgcacgtattttatctttcttatccctttggcggctataacgcgaccgcgatcaaagcagcaaaagacgccggtttccatctggcggtcaccacggtgagagggaaggtgaagccgggagataatccgatgctgctcaaaaggctgtatattttacgcacggattcgctggaaacgatgtcgcggctgatcagcaaccagccgcagggataaggactatcaggcaacctgtaccggaatagctttcgcggtgcgcttcatttcgttgtcgccttcaaaataggccactttcggacgccatgtacgcgcttcttcatcagacatggtgacgaagctggcgataatcacaatgtcgccaacttcagcacagtgcgccgccgcaccgttcaccgagatgattctggagccgcgttcagccgcaatcgcataggttgagaaacgtttcccattggtcacgttccagatatcaatcgcttcgttttccagaataccggaggcatcaaggaaatcttggtcaatggcacaagaaccttcgtagtgcaggtccgcctgcgtgacttttacgcggtggagcttgccttgcagcatggtgcgaatcataacttctttaccctgtcgtttaccttggctaagcaggcgcttgtggcctgctttggaaattctcaggcagtattgcccgatttttaacccctgtctactgggctaatgtaacgctttgattatcgatcagacgcgcctgacccagccaggcggcggccagaatcactgcgcgtttgctggtttccgtcagctcctgcagcgtgtcggcatcacggatttgaatgtcgtcggcacggaagcctttttcattcagttcctgttcggcaatggcaataatctcttgcagctcacgattacccgcaatcagtttttcagcgatgctattcatcacgttgtatagacccggcgcaattttgcgctgctctgcggtcagataagcgttacgtgagctgagcgccagaccgtctttagcgcgaataatcggcacgccgacgatctcaatgtcataactcatatccgccaccattttgcggatcagcgccagttgctggaaatccttctcgccaaagcaggcgatatccggctggatcaggttgaacagcttgctgacgatggtcgagacgccgcggaaatgacccggacggctggcgccttccagcatggtagagaggccgggaacatcaacgtacgtttggccttccagcccctgcgggtagatttcctcaacggctggcgcaaagacataatcgactttgcgtttgttcagcttttcacaatcttcctgcagcgtgcgcggataacgcaccagatcgtccggccggtcaaactgcatcgggttgacgaaaatgctgacgatcaccacatcagcccgggcttttgcctcatcgaccagcttcatatggccgtcgtgcaggttgcccatggtgggaaccagtgcgacgcgtttaccttcctgacgcagacgacgaatatgctggcgcagcagcggcagggtttcaatgattagcacaacaaaactccttgagttgcttgatgatcctgcccgatggcgctgcgcttatcaggcctacatccgttgaggatctgtaggccggataagacgcgtcgcgtcgccatccggcacggtcagaaaaattagtgaaagctgtgttcttcgcccggataaacgccggactccacttcagccatatactgctgtacggcggcgcgcatgtcgcccgcctcggcaaggaaatttttcgcgaatttgggaatatggccgccggtgatgccaaacgcatcgtgcatcaccaggatctgaccgtcggtgacgttgcctgcgccgatgccgatcaccggaatcgacagcgcttccgtgacgcgcttcgccagctcaaccggcacgcactccagcaccagcagttgagcgccagccgcttctaaagccagcgcgtcatccagcagcacttgccctgcatcgccgcggccctgaattttatagccgccgaagatattcaccgactgtggcgttagccccagatgaccacaaaccggcacggcgcgttcggtgagcattttcaccgtatcaaccagccaggcgccgccttcaattttgaccatattggcccccgcacgcatcacgatagccgcgttttcacatgcctgttccggggtggcgtaagccataaacggcaggtcggagagcaatagacagttgggcgcgccacgtcgcacggcacgagtgtggtaagcgatatcttccacggtgaccggcagggtggagtcgtgcccctgaatcgtcatgcccagtgagtcgccaaccagcatcacattgataccttcgtcggcaaataacttagcgaagctgtagtcgtaggcggtaattgtcgcgaagcgttttttctcttgcttgcatttctgcagcagtgaaatggtggtgggtttcataacgtttcctgatggtaaaagttatatttcccggcattctaacagtcatattcaggggggcaattgatttaagcaatcgtttggcgctaaagcagtaaacgctaaaggggaggcgatgttttaccagtgggcgggttttgcagcaccaagatgggtgagatgctgatgcaggctgataccatccggaaagatcagatcaggagcgatttcgaataacggccacagcataaaaccgcggtttttcatgtcgtagtgcggcacggtcagatggtcggtgttaatgacttcatcgccaaacagcataatgtcgagatccagcgtgcgcggcccccagcgttcggccttgcgcacccggccctgttgcagctcaatgcgctgggtatggttaagcaattcttcgggggcgagagcggtatccagcgccaccgcagcgttcaggtaatcgggctgatcctgtgggccaagcggcggcgtgcggtaaaacgaagaaaccgcgacgatacggctatcgggaatgtcggcgatagccttcagggcggcattgacctgctccagcggagaggccagattactgccaagcgcgatatacgcgatcgtcatacggtgccctcgcggcgcggcgcgcgtttgcgcggacgtgaacgacggcggcgtggagcaggatcgtcgtccagctcgttgagcatccctttttgttccggcggcgcggaagcctgaaactcggcccaccactgcgccagacgttgcagttcagtattattttccacctgagcgcgcagctccagcaaatcaaacgcggcgcggaatttgggatgttccatcagtttccaggcgcgtttgccctgacgacgggacatgcgtaactgaagctgccaaatatcacgggtaagcgtggtaaggcgtttcgggatcgccagtgaacggcaggcttcatccagcacgtcattcatggccagcgcgaaagcatcgtaataggcaaggccgctctcctgagcgattttttgcgccatctccagcagcggataccagaacatggcggcaaacaaaaatgccgggttaacgcgcatctcgttacggatgcggttatccgtattcttcaacacctgcgcaatgatgcgttccattgcgctgtcgccgttttcggtgaaataacgcgtaatggtaggaaacaacggctggaagaggtggtattcccgcagttgttgataggtttcataaccgttccccgcctgcaacagcttcagcgactcttcgaacaggcgcgcgggaggaatgtcgtttagcaaggttgccagacgcgggattggctcagccgtttcagggctgatacgcatattgagcttcgcagcgaaacgcacggcgcgcagcattcgaaccggatcttcgcggtagcgcgtttccggattgccgatcaggcgaatcacgccttcttgcagatcctgcattccgccgacgtaatcgcgcacggtaaaatccgctacgctgtagtaaaggctgttgatggtgaaatcgcggcgctgggcatcttcttcgatagagccgaagatattatcgcgcagcagcataccgttttgcccacgctgggaggtcgtacggtcgctttcactgccttcatgatgaccacgaaacgttgccacttcgataatttccgggccaaacatcacgtgagccaggcggaaacggcgccccaccagacggcaattgcggaataatttccgtacctgatccggtgttgcgttggtggtcacgtcgaaatccttcggctttttaccgagcaggagatcgcggacgccgccgccgaccaggtaggcttcatagcccgctttgttcagcctgtacagtaccttgagggcattttcactgatatctttgcgggagatagcgtgctgttcacgcgggataatcgtcatatgtggacgggcgacggcttgttctgcctcgctctcctcgcggcttaacaccttacggcaaaaattagcgactcgggtaaaaatagcgcacctcggtagtgtcatacattaataagatcaacttactctatgtctttcgcattacggcagacgggcgtaagagagcaacgcgacctgggctgtaagcatcattaacgccgcagcaatgcgaaagacgatgagcaaaaatagcggctaatcatagctcagcgagacgcatttgagaatgccggatttacattagccgatgtgggtacggctgtaagcctccagtgcgccaccgcaaagcgcagcaactcctcaacagacatctcctgccacgctacgacggcgcgttggcctaaaaagcgcaatgcctggaccagtaccgggcgcggatcgcctgtcgcaagcgcaggggcatgattttgcttggaaagtttagcgccttgttcgttgagcgccagcggaaggtgcacgtagcctggcacacgccagccaaactgtttatacagcgaaagttgtcggacagtgggttcgattaaatctgcgccgcggacgatctccgttaccccctgaaaatgatcgtcgaccaccacggccagattataagcaaacagtccgtcgcggcggtggataataaaatcttcgctagccagctgcgggtcagcctggatgtcgccgcgcaaggcatcatggaaatgcatcaccggatgctgctgtttaattctgacggcggcattctccggcccgtggcataacgtccgacaatggccgtcgtaaataccgcccagacgttgaatgcgcgagcgggggcaagtgcagtagtagctcagtccctgctcgtgaagccaggccagcgcctcgcgataagcctcatgacgctgtgattgccataagacctcgccatcccagtgcaggccgtaatgttccagctggcgcagaatggtcgctgcggcaccgggaacttcacgtggggggtcgatatcctcgatgcgaacgcgccaaattccgcgttgcgcacgggcttgtagatagctgccgagggcggcgattaacgagccgaaatgcagttcgccggatggcgacggcgcgaaacggccaatatagtgtgagtcagtcatgctgcgggcaataaagaataaggcgggaaaactcccgcctgtcataaatagggtagaaacgaacgggattaacccgccatctgtttttcgcgaatttcagccagcgttttgcagtcgatgcacagatcggctgttggacgcgcttccaggcggcggataccaatctccaccccgcaggactcgcaataaccgaagtcttcatcttccactttcttcagcgtcttctcgatctttttgatcagtttgcgctcacggtcacgattacgtaactccaggctaaactcctcttcctgcgcggcgcgatcgaccggatcggggaagttggcggcttcgtcctgcatgtgcgtcacagtgcgatcgacttcatcccggagttgattacgccatgcttcaagaatacgcttgaagtgcgatagctgggcttcgttcatatactcttcgcccggtttctcctggtacggctccaccccagcgatggcgagaatactcagggacgatgttttacggttttgcccttcttgcatgttgcttctccttaacacgcactatcgatccccatgttcgggggaaaatcaggtcgctataaatagcagatgcttttccggatagcaattatctaaacgtaacacttgacaaccctgtgaggaaaagcgtatttacgcacgcggccagaatacttaataatcaggctgttattccactacaacgttatgggtactggttcgttcagttccattttttgggctgaaagttctgctttataagctaaaacttccacgcctttattctgagcctcgctcaatagctgcgcgtattttatatcgatatgacgtgcgggtgaaaaacgtgtaatggcggagtgcagcaccgcgaacaccaccactgcgcgatgacctgccgccgcaacgcccatcaattcccgaagatgtttttgccctcgttcggtgatggcgtcgggaaaataaccgttttctttttccgctaacgtgaccgatttcacttcaatatagcagtccgggcggaaatctgcctgtaacataaaatctatacggctgcgctcggcgccatatttgacttcacttttcagaatattgtaccccgccagcgccggcaggcgattctcctgaattgcttctttcgttagctggttcgcccgcagcgtattcacgcaaatgaatgcgccggattgcgtttcagtcaattcccaggtatgcggatatttgcgtttagtattttctgatgtcgaataccagacggtatcgccaggcgtggcgcagccggtcatcgcgccggtattaggacagtgcagcgtaagcgttgtaccgtcaggggtgatgacatcagctaaaaaacgtttatagcgctgaatcagcgtagcgcgttgtaaagggggtgagaatagcatcgacgttccttcattattattcgcccagcgtccagcgctgcagctcggcatagcgggtacggccttgcccatacgaagaggcgtaaagcgcaaacgacgtgaccggaaatgaccagcaaaagcccggcggcgggatagccaccgtatggctggcgtcgcgcagcagcgtaatatgcgggtgaaaaggctgcgggctttggtaacaaccgctgcgggcggcctgcgcgcgcagcatattagccaactgcaacaacccgcgcggcggctggcgcatccccagccacaccacgcgcgaacgcagccactgaccggcgtcatccagatgtagcgtaaagcccggctggcgaattcgtccggccagttgcgcaagcgcgcgctgcttatcgctactgacgtcgcctaaaaaggccagcgtcaggtgtaggttcgccgctgcgacggggcgtccgtcttcagacgcaaaatgggcggcgcgccaggcgataatttgtgcgcgcgcgtcgtcgggtaagtcaatcgcaaaaaacagccgttttggctcagacatagggatactcggttatggattaacacgatgctacaatgcggcgcaaagaaagttaaccccgtggagccgtttgtgacgtcattgcccgttgccgccgtattgcctgaattgttgacagccctaaaaaccgcgccgcaggttttgttgtccgcgcctaccggggcggggaaatccacctggctgccgttgcaactcctgcaacaggggccggttgctggaaaaatccttctgcttgaaccgcgtcgtctggcggcgcgtaatgtcgcgcagcgtctggcggaagcgttgaatgaaaagcctggcgaaacggtaggttaccggatgcgcgcgcaaagctgcgtggggccgcgtacccggctggaagtggtgacagaaggcgtattgaccagaatgattcagcgcgatcccgaattacgcggcgtggggctggtgatactggatgaatttcatgagcgcagtttacaggcggatttagcgttagcgctgttgctggatatccagcaagggctccgtgacgatctcaggctgttaatcatgtctgcgacgctggataacgacaggctttgtcagcgactgcctgatgcgccgacgatcgtctcggaggggcgcgcgtttcccgtggagcgacgttatcagccgcttgcggcgcatttgcgttttgatgaagccgtcgcgatggcgacagcggaactgctgcgcaatgaaaacggttcgctgctgctatttttacccggcgtaggcgaaatacagcgcgttcatgaacatctggcgtcgcgggtaggcagcgatgtcctgctttgtccgctgtatggcgcattgtctctggaagcgcaacgcaaagcgattgttcccgcacccgccgggatgcgtaaagtggtattggcgactaacattgccgaaaccagtttgacgattgaagggattcgtctggtcgtcgatagcgctcaggagcgcgtggcgcgatttgacgcgcgaacgggactgacgcggctggttacgcagcgtatcagtcaggcgtcaatgacgcagcgcgcggggcgcgccggacgactggcgccgggtatctgtttacatctgctggccaaagaacaggcggagcgggcggcggcgcaaagcgatccggaaatcttacacagcgacctttccggtttattgatggaggtgttgcagtggggatgtcacgatccggcatcgcttttctggctggacaggccgccggaggtgaatcttcaggccgcccgccgtttattattgatgttaggcgcgctggagggcgagcggttaagcgcgcggggccggaaaatggcggcaacaggtaacgatccgcgcctggcggcgatgttagtcaacgccggcgagggcgatagcgccgccactgccgccatgctcgcggccatccttgaggacccgccgcgcggcggcggtacggatttaagcgtagtattttcgcggcgacagccgggctggcagcagcgtagccagcagcttttaaaacggctgcaggtgcgtaatggcgagccggatagcgcgcttattatgccgctgttggccagagcgtttagcgaccgcatcgcgcggcgtcgtggtcaggaagggcgctatcagttagccaatggtatgggcgcgatgttagatgcggatgacgcgttgggacgtcatgaatggctgatcgcgccgctgttactgcaaggtagcgcctcgccggacgcccgaatattgttggcgcagccgctggatattgcctcgctgattcaggcgtgtcctgatttactgcgccagtccgacacggttgaatgggacgaggcgcagggaacgttgaaagcatggcgcagaatgcgtattggacagttgacggttagcgttcagccactggcgaagccgtctgaagaggagcttcatcaggcgatgctgaacggcatccgcgataaaggtctgtccgtccttaactggacgccggaagcggagcagttccgtctgcgtctgcactgtgcggcgaaatggctgccggaatatgactggcctgccgtggatgaggcgtcgctgctggcgactctggaaaattggttgctgccgcacatgacaggcgtacagtcgttacggagtctgaaatctctgaatgtgactcaggcgttacggggactgcttgactatgccatgctgcaacgtctggatagtgaactgcctgggcattacactgtgccgacgggaagccgaataacgattcgttatcatgaagataacccgcccgcgctggcggtcagaatgcaggaaatgtttggcgaagcgaagaccccaaccatcgctcagggccgcgtgccgctggtgctggaactgctttcgccagcgcagcgaccgctacagattacgcgcgatttaagcgctttctggcagggggcgtatcgcgaagtgcaaaaagagatgaagggccgttaccccaaacatgtctggccggacgatccggcgaatacggccccaacgcggcgcacgaagaagtattcgtgacgtgttatacgttgcctccaggccagataaggcgttaatcgccatccggcaaaagggtaaattgagagatttcttcttctgtcgtctggcggaagaatagagaatcgggcctttgcgcctgtatgttgcggagaaaaagcatggcggggaatgaccgcgagccgattggacgtaaggggaaaccgtcacgtcctgtgaaacaaaaggtgagccgtcgtcggcagcatgacgacgattatgatgatgactatgaggatgaagaaccgatgccgcgtaaaggtaagggcaaagggcgtaagcctcgtggcaagcgcggctggctgtggctattgctaaaactgtttatcgtttttgtggtgctgttcgccatttacggcgtctatctggatcaaaaaatccgcagccgtatcgatggcaaggtctggcagcttccggcggcggtatatggccggatggtgaaccttgagccagacatgcctgtcagcaaaaacgagatggtaaaattgctggaagcgacgcagtatcgtctggtgacgaagatgacccgtcccggcgaatttaccgtgcaggccaatagcattgagatgatccgtcgtccgtttgacttcccggacagcaaagaagggcaggtgcgcgcgcggctgacgttcagtgacgggcgtctggaaaccatcgtcaatctggataacaaccgccagtttggcttcttccgtctcgatccgcggcttatcaccatgctttcttcgccaaatggcgagcagcgtttattcgtcccgcgcagcggtttcccggatctgctggtcgatacgctgttggcgacggaagaccgtcatttctatgagcatgatggcattagtctttactctatcgggcgtgcggtgctggccaacctgacggcgggacgcacggtgcagggggccagtacgctgacccagcagctggtgaagaacctgttcctctccagcgaaagatcatactggcgtaaagcgaatgaagcctacatggcgctgatcatggatgcccgttacagtaaagatcgtattcttgagctgtacatgaacgaggtctacctcggtcaaagcggggacaatgaaattcgcggttttccgctggcgagcctgtattactttggtcgtccggtagaggaactgagcctcgatcagcaggcgttactggtggggatggtaaaaggggcgtcgatttataacccgtggcgcaacccgaaactggcgctggagcgtcgtaacctggtgttacgcctgttacagcagcagaaaatcatcgatcaggaactctatgacatgctgagcgcgcgtccgcttggcgtacagccgcgcggcggcgttatttcaccgcagccagcgtttatgcagatggttcgtcaggaactgcaggcgaagctgggggataaaattaaagatctctccggcgtgaagatcttcaccacctttgactccgtggcgcaggatgccgcagaaaaagccgttgtcgaaggtattccggcgttgaagaagcagcgtaaattgagcgatctggaaaccgcgatggtggtggtggatcgctttagcggcgaggtgcgcgcgatggttggcggggcggagccgcagtatgccggctataaccgtgccatgcaggcgcgccgttccatcgggtcgctggcgaaaccggcgacctatctgaccgcgttaagtcagccgaacttataccgtctgaacacctggattgccgatgcgccgatttctctgcgccagccgaatggtcaggtctggtcgccgcagaacgacgatcgtcgctacagcgaaagcgggaaagtgatgctggtggatgcgttaactcgctcaatgaacgtaccgacggtcaatctggggatggcgttaggtttaccggcggtaaccgatacctggacgaagctcggcgtgccgaaagatcagctcaatccggttccggctatgctgttaggggcgctgaacctgacgccgatcgaagtggcgcaggcgttccagactatcgccagcggcggaaatcgcgcgccgttatcagcgctgcgttcagttattgcggaagatggtaaagtgctgtaccaaagttatccgcaagctgaacgcgctgtaccggcacaggcggcttacctgacgctctggacaatgcagcaggtcgtccagcgtggtacggggcgtcagcttggcgcgaaatatccgggtctgcatctggcgggtaaaaccgggacgacaaacaacaatgtcgatacctggtttgccggtatcgacggcagccaggtgactatcacctgggtaggccgtgataacaaccagccgacgaaattgtacggcgccagcggcgcgatggcgatttaccagcgctatctggcgaaccagacgccgacgcctttagttctgacgccgccggaagatgtggtggatatgggcgttgattacgacggtaattttgtctgtagcggcggtatgcgcactctgccggtctggacggacgatccaaatacgctgtgccagcagggcgagatgatgcagcagcaacagcagccgtcaggcaatccgttcgatcagtcgtctcagccgcagcagcctgcgcagcaacagccgccgaaagaagagaagagcgacggcgttgccggctggattaaggagatgttcggcggcaattaatcacggtaatagtaccgggtggcgctgtgcttatccggtctacaccgttacgaccccattatgtgcgacgtaggccgaataaggcgcttacgtcgccatccggcaaatcccctataaataacatttcagtctaatttattaacccttccttttcatctggttatttcttaaccccttagttttcgtagggccgcgtatcgcttgccattgcgacgatatttcgcctatcatgctgtggttataataataattatcgtttacgttatcattcactttcatcagagatataccaatggcgcgtcttaaaactgctcagccaaactcctcactgcgtaaaatcgcagttgtagtagccacagcggttagcggcatgtctgtctatgcacaggcggcggttcaaccgaaagaagaaaccattaccgtaaccgcagcgcctgccgcgcaggaaagtgcctggggaccggcggcaaccatcgctgcaagacaatccgccacggcaaccaaaacggacacgccgattcaaaaggtgccgcagtctatttccgttgttaccgccgaagagatggcgttgcatcagccaaagtcggttaaagaagcgttgagttatacccctggcgttgccgtgggcactcgtggcgcgtccaatacttacgactacctgatcattcgcggtttcgccgctgatggccaaagccagaataactatctgaatggcctgaaaatgcagggtaacttctataatgatgcggtgatagacccttatatgctggaacgcgcggaagtgatgcgtggtccggtttccgttctgtacgggaaaagtagccctggcggtttgctgaatatggttagcaagcgcccgacgacggagccgctgaaagaaattcagttcaagatgggtactgacagcctgttccagactggttttgacttcagcgacgcgctggatgaagagggcgtatattcttatcgtttgacaggtctggcgcgttccgccaatgcacagcaggatcgcgcggaagagcagcgctatgcgattgcgccagcgttcacctggcgtccggatgacaagacaaactttacgtttctctcttacttccagaatgaaccagagacgggttactacggctggctgccgaaagagggaacggttgagccgctgccaaacggtaaacgtctgccaacagatttcaacgaaggggcgaaaaacaatacctattctcgtaatgagaagatggtagggtacagcttcgatcatgaattcaacgacacctttaccgtgcgccagaatttgcgctatgccgagaataaagtctcgcaaaatagcgtctatggttacggcgtttgttccgatccggcaaaccgtgacagcaagcagtgcgcggcattagcgccagcggacaaaggtcattatctggctcgtaaatatgttgttgacgacgagaaactgcaaaacttctccgttgatactcagttgcaaagtaaatttgccaccggtgaggtggatcacacgctgctgaccggcgtcgactttatgcgtatgcgtaatgatatcaatgcctggtttggctacgacgactccgtacctctgcttgacctctataacccggtgtacactgatttcgactttgcttcgcgagatccagcaacatccggcccgtaccagattttgaataagcaaaagcaaacgggtctgtacgtccaggaccaggcacagtgggataaagtcctggtaacattgggtgggcgttatgactgggccgatcaagagtctctgaatcgcactactggcatcacatctaaacgtgatgataagcagtttacctggcgtggtggtgttaactatctgtttgataatggaataacgccttacttcagttatagtgagtcgtttgagccggcttcacagacgggagagaacgggaaaatatttgcaccttcgaaaggtaagcagtatgaagcgggggttaaatatgtaccgaatgatcggccgatagtcattaccggtgcggtctatcagttgaccaaaaccaacaacctgatggctgatccggcggggtctttcttctcggttgaaggcggtgaaattcgcgcccgcggcgtggaactagaagcgaaagcggcgctttctgcaagcatcaacgtcgtgggttcttacacctatactgacgccgaatacacgacggatacgacctataaaggtaatactcctgcacaggtaccaaagcatatggcgtcgttgtggggcgattacactttctttgatggtccattgtctggtttaacgctggggaccggcgggcgtttcacggggtcaagctatggcgatccggcaaactcctttaaagtagggagttatacggttgtcgatgcattggtacgttatgaccttgcgcgcgtaggcatggcaggctccaacgttgcccttcatgtcaataatctgtttgatcgcgaatacgtcgccagctgcttccagacgtacggctgtttctggggcgcagaacgtcaggtcgttgcaacggcaaccttccgtttctaatttctttttgggcacggcttgccgtgcccgttttacaagttggctgcgatgcaggaaaaccacattcattccgataccacctttgcgctgcgaagcgtcgcctttcgtgtgccgggccgcacgcttttacaccccctctcgttaacgtttcccgcaggtcgagtcaccggacttatcggccataatggttccggtaaatccacgctgttaaaaatgctgggccgccatcagctgccttccgaaggggatattctgctcgacaatcagccgctggcgagctggagcagcaaggcgtttgcccgcaaagttgcctatctgcctcaacaattgccacaggcggaaggaatgacggtgcgcgaactggtggcgattggccgctatccgtggcacggcgcgctgggacgctttggcgtcgcggaccgggaaaaagtagacgaggcgattacgctggtcggcttaaaaccgctggcgcatcgtctggtggacagtctttccggcggtgaacgccagcgcgcgtggattgccatgctggtcgcgcaggacagccgttgtctgctgctggatgagccgacgtcagcgctggatatcgcccatcaggtggacgtgctggcgctggtgcatcgtttaagccagcagcgcgggctgacggtggttgcggtgctgcacgatatcaacatggcggcccgctactgtgattatttagtcgcgctacgcggcggtgaaatgattgcgcaaggaacgcctgcggaactgatgcgcagtgacactctggaacagatttacggtatcccgatgggtatccttccgcatccggcgggcgcggcacctgtgagttttgtgtattaatgcgtgatttatatcctctgactcgccgccgtttattaacggcgatggcgctctcgccgctgctgtggcaaatgaatacggcgcaggctgccgctatcgatccccgccggattgtggcgctggagtggctgccggttgagctgctgctggcgctcggtattacgccttatggcgtggcggacgtgccaaattataagctgtgggttagcgaaccgccgttgccggattcggtgattgatgtgggtcttcgcactgaacccaatctcgaactactgacggagatgaagccgtcgtttatggtctggtcggcaggttacggtccctcgccggaaaaactggcgcggatcgcgccggggcgcgggttcgattttagcgacggcaaaaagccgctggcggtagcccgacgctcgctggttgaactggcgcagacgctgaatctggaagctgcggcagaaaaacatctggcgcaatacgatcgcttcatcgccagccagaagccgcattttatccgccgcggggggcgtccgttactgatgacgacgcttatcgatccgcggcatatgctggtgctcggcccgaattgcctgttccaggaggtgctggacgagtatagcattgtcaatgcctggcagggtgaaaccaacttttggggcagtacggcggttagcatcgatcggctggcgatgtataaagaagcggatgtgatctgcttcgatcacgggaatagcaccgatatgaacgcgctgatggcaacgccgctgtggcaggccatgccgtttgtccgcgccgggcgctttcaccgggtgcccgccgtttggttctatggcgcgaccctctccacgatgcattttgtccgcatcctgaataacgtgttgggaggcaaagcgtgagcagaaaacgtgaaatgccggatggcggcgtgaaaaacgccttatccgacctacggttcgggcgctttgtaggccggataaggcgaagccgccatccggcgttgctgttattggcgctgtttgttgccgcctgctggctgacatgggttaacttctccgttgcgctaccgcgcagccagtggcaacaggctatctggtcaccggatatcgacatcattgagcagatgatttttcattacagcctgctgccaagactggcgatttcgctgctggtgggcgcggggcttgggctggtaggcgtcctgttccagcaagtattgcgtaacccgctggcggaaccgaccacgctgggcgtggcgaccggcgcgcaattggggatcacggtgactacgctatgggcgattcccggcgcgctggcgacgcagtttgccgccctgacgggagcctgtatcgtcggcgcgctggtgttcggcgtggcgtggggcaaacgtctgtcgccagtgaccctgatcctcgccgggctggtggttagcctctattgtggcgcaatcaaccagttactggtgattttccaccacgatcagttgcaaagcatgtttttatggagcaccggaacgctaacgcaaaccgactggagcggcgtgcagcgtctgtggccgcagttgctgggcggtgtgatgctcacgttattgttgttacgcccgatgacgctgatggggctggatgacggcgttgcgcgtaatctgggtctggcgctgtcgttagcgcgtctggcggcgctgtcgctggcgattgtgttgagcgctctgctggtcaacgcggtgggcattatcggttttatcggcctgtttgcgccgctgctggcgaaaatgcttggcgcaagacgtctgctggcgcgcctgatgctggcgccgctcattggggcgcttattttgtggctatccgatcagattatcctttggctaacccgcgtatggatggaggtttccaccgggtcagtgacggcgttaatcggcgcgccgctgctcctgtggctgctgccgcggcttaaaagcatgagcgcgccggatatgaacgccagcgatcgtgtggcggcggaacgtcggcacgttcttgcttttgccgttgccggtggcgcgctcctgctgctggcaacatgggtcgccctctcttttggtcgcgacgcgcacggctggacgtgggcgagcggaacgctgcttgaagaactgatgccgtggcgctggccgcggatactggcggcgttaatggcgggcgtcatgctggcggtggcgggctgcattattcagcgtctgaccggtaatccaatggccagcccggaagtgctggggatcagttccggagccgcgtttggcgtggtgttgatgctgtttttggtgccggggaatgccttcggttggctactgcctgccggaagcctgggcgcggcggcgacactgctgattattatgatagccgccgggcgcggcggtttctcgccgcaacggatgttgctggcggggatggcgctcagcaccgcgtttaccatgctgctaatgatgctccaggcgagcggcgacccgcggatggcggaagtattgacctggctctcaggatctacctataacgccactggcgggcaggttacgcgaaccgcgatcgtaatggtgattttgctggcacttgtgccgttgtgtcgccgctggttaacgattttgcccctgggcggcgatgccgcgcgtgcggtgggcatggcgcttacgccgtcgcgtatcgcgctgctggcgctggcggcgtgtttgacggcaaccgcgacgatgaccattgggccgctgagtttcgttggactgatggcgccgcatattgcgcggatgctcggttttcgccggacgatgccgcatatggtcatctcggcgctggcagggggcgttttactggtctttgccgactggtgcggcaggatggcgctatttccgtatcagatcccggcgggactgctttcaagctttattggcgcgccgtactttatctatttgctacgtaaacagagtcggtaaaaaaaagctgtgccacatttatgtcgggtggcagccatgctcaacccgacctacaaattacacaatatcaatatgttgtggcaatattttgtaggcctaaaaatagctgaacgctatcaggtgcgagagctgtcctgtcacgttttatcgagggaactctgcttttattttcagcaagaagcaggtgttatttttgtatcgataagtcatgagctatttcagtggcgcgccgctgtctcgtgaacagggtgactaatttcaacatatccaggcccgaaacgttgatgataaattgcggcatgatctatccaataataagaattaccggtttcggtattaagcctttttaaatattaagatgcggatgccgcatctttaatgcatctcgtaaatcaattttaatttaataataaattttcattataaaacttcgataataaaatattatttttttatcgaagtaataaaaaacaactctattaaaataaattaattgccacgagtaaacaaaaaaaatgtaacttagcattttttgatttttttaatggaatttataccaaaaataaatgttacgcgtcattgctatatattcagtactgtaattctgatctttttttattcattttgacatgtttattgtttttttggctctcccgtcttgctttgtttgttttttgaacggtaaaaaatatttattatttaatgctgatgatcctttaaataaaaaacacttgtctttgggtttttaatggaaaatacttcaccgcgcctaagggatgttatttattaacgtgttgtttgcttctttttaatgttgcatcgggaatttcataactcgtcatataatatatatctacccatataaacatggggtattgagtataactccgtgtgaatagcgtaaaaatactcaccaacttttaataaggatgaaaaatgaatacagcagtaaaagctgcggttgctgccgcactggttatgggtgtttccagctttgccaatgctgcaggcagtaatactggtacggttacttttaccggtactattgaagattcaccgtgttcaatcgtggttggcgacgaacaccagaccgttaacctgggccatatcggtactggttctctgatgggcggtaaagaatcttcaaaagtcgatttccatatcggtctggaaaactgcgcattcaccactgagaaagaagtgtctaccgttttctctgccatcggtaacgaatccagcgctaatccgggcagcgttgcgctgatgcgtatcggcggcggcgaaatggcgggttccagcattgtcatcggcaaccacctgggttccgcgatcaaattgggcgacgcttacagcgaaaatctgacgatgaacggcagcgttgcggcggcgaaacagactcttaacttcaaagcctgggtgaaaggcgattccgctgccagcactatcgataccggcgaattcagcagcaccgtaaacttcacgatcagctatctgtaagtgaaatatcatcctgcggcagtctgccgcaggataatgcttaaagtaaaaaaatagattatatatttcagggatagattgtctgatggctcactataaaaaatttcgtctgagcacgcttgcggccgtggtgggtattgttctggctgtcggtccggaaaatagctatgcggaagcgcccattcaatttaatacccgatttcttgatgttaaagatgatgccagcctggatctctcccgcttttcccgtaaaggctacattatgccggggagctatcatctccaggtgctggtcaatcagagtcaaattgcccaggataatgttattacgtattccgttgataataacgatcctgataacacctatccctgtttatcgcctgaactggtatcgctgctggggttaaaacctgaaatagcagataaaatgatctggataaatgccggtcagtgtctgcaaccagatcaactggaggggatggaaacccaaacggatttaagccagtcaacgctgacggtgattattcctcaggcctatctggaatacagcgatgaagagtgggatccaccttcccgctgggatgaagggattcccggcgtgttatttgactacaacgttaacagccagtggcgacatgctgaacatgatgacggcgatgaatatgacatcagcggcaacggcacggtgggtgccaacctcggcgcgtggcgtttgcgcgcggactggcaggctaactatcgtcacgaaaatgacagcgaagataaagacaactttggctccagttccgaacagaactgggactggaaccgctattacgcctggcgggcgatcccgcagctccgggcgcagctaacgctgggcgaaggatcgctggaatccgatattttcgatggctttaactatgttggcggcagccttatcaccgacgatcagatgttaccgcctaatctgcgcggctacgccccggatatatcaggcgtggcgcgcaccaacgccaaagtcaccgtgacccagcgcgggcgggtgatttatgagtcgcaggtcccggctggaccgtttcgcattcaggatattaatgaaacggtatccggcgatctacacgtcaaaattgaagaacaaagcggtcaggtgcaggaatatgacgtcagcaccgcctccattccgtttctgacccgtcccggccaggtgcgctacaagttggcagccgggcgaccgcaggactgggatcacaatatggaaggcggctttttcacctcagccgaagcctcctgggggatcgctaacggctggtcgctgtacggcggtgccatcggtgagcaggattatcaggcgctggcgttaggactggggcgcgatctggcgctgctgggcgcgttttccgtcgatgtcacccattcccgtgcgacgctgccagagggtagcgcctacggcgacggcaccattcagggtaactcgttccgtgccagctacgctaaagattttgatgatatagacagccgtctgacgtttgctggttatcgcttttccgaagaaaactacatgacgatggacgagtttatcgatacgcataatgacgataacgatcgtcagcgcaccggccacgataaagagatgtataccctgacgtacagccagaacttttcggcaataaacgtcaacgcctatatcaactacacccatcgcacctactggaatcaacctaaccaggacagctataacctgacgctgtcgcactatttcgatgtcggtgaggtgcgcgggatcagtctgtcggtgaacggttttcgcaacgaatatgacaatgagcgtgatgacggcgtgtacgtctcgctcagtattccgtggggcaacaaccgcacgctgagctacaacggctcctttagcgatgacaacaacagcaatcaggtcggctattacgagcgcattgacgatcgcaataactaccagatcaacgctggtcgcgcggataacggtgcgactctcgacggctactaccgttatcaagcgagctatgccgacattgacgtcagtgcgaactatcaggaaggcgactatacctccggcggactgaacatccagggcggcgcgacgctgactgctaaaggcggggcgttgcaccgcaccagcgtcaacggcggctcgcggctgctggtggatgtcggcgatgaagcgaacgtacccatctccggctacagcacgccggtatataccaacgcgtttggtaaagccgtcattgtcgacgtcaacgactactaccgcaaccaggtgaaaatcgacattacccagttgccggaagacgcggaagcaatcctctccatcgctcaggcgaccctgacggaaggggcgatcggttatcgccgcatggaggtgctcagcggtaaaaaagccatgggcagtatccgcctgcgcgatggcggcacgccgcccttcggcgcagaggtttacaacagtcgccagcaacagttagggatcgtaggtgaagacggcagcgtttatctgatcggcattaaccccggcgagcggttgcaggtgacatgggaaggtaaaacgcagtgtgaagcggcgttgcccgatccgctgccgggcgatctgtttagcggcctgttgctgccgtgcatcggcgatgcttcatcacctgaggcaacgcagcccgaagagaaaccattactccagcttcatacgcagcggcggacgtcttcgacgcaacccgaagcgctctcttctcgttatccaacacattgattcaggaaaccgcattcatgatgtcattaaaacgttataacctggccgctgttttgctgcttttgctgggcggctacggtagcgcccaagccgccatcgcgcccgatcgcacccgcctggtgtttcgcggcgaagataaatcgataagcgtcgatctgaaaaacgccaacagcaaactgccctatctggcgcagtcctgggtggaagatgagaagggcgtcaaaatcacctcgcctttaatcgtcgtcccaccggtccagcgcattgagccgtcggcaatcggacaggtcaaaattcaggggatgccggcgctggcgtcgctcccccaggatcgggaaacccttttttattacaacgtgcgcgaaattccgccgcaaagcgacaagcccaatacgctgcaaatcgccctgcaaacgcgcatcaaagttttttaccgcccgcaggcgctatcgaaaatcgatatgcagcatccctggcaatacaagatcacccttcagcgtcagggcaatggctatcaggtgagcaatccgaccggttactacgtggtgttaagcaacgccagcaaccgcatggacggcacaccagccagaggctttagccctttagtgattgcaccaaaaagcaacgtgacgctgggaggggacgccagtgaattaggtcactcgcctgtgctgacttacgtcaacgattatggcgcgcggttaccgctgatttttaactgtactgacaacagttgtgcggtagatgaagcaaaaagcagaaagtcgtaaccgacaaggagacgcaagatgaggcaatggcggttacggctgggcacggtaacgtgtgcggccatgctgagtgcggtcagtatgccgctggcagcgggaagtaagacggtcaacatgacgctgacgatagtcgttaatgccgcgccgccctgtactgtgaccggcggtgaggtggaatttggcaatgtgttgacgacgaaagtggatggggtgaattaccggcaggcggtgggctatcgcctgagctgtaacggcagagtgagcgattacctgaagttacagattcaggggaatgcggtgactatcaatggcgagtcggtattgcaaaccgatgtcgatggattggggatccgtctgcaaaccgccacggatggcgagctgatttcacccggcaatacgcaatggttgtcatttcaatacagcggtggcagcggtccggccattgaggcaattcccgtcaaaaataatggcgtaacgttaacaggcggcgcgtttaacgcaggcgccacgctggtggtggattaccaatgaaaaaaatggctttgacgatgttaatggggggcagccttgccgcacaggcagccgataatcttaagtttcacggcacattaatttcaccgccgaattgtacgattaacaatgatcagacgatcgacgttaagttcggtaacctgctgattaataaaatagatggtacgcgttatgcgcagaatgttccgtatgagatcacctgtgattcaacggtgcgcgatgagacgatggcgatgaccctgacgctaagcggttccgtgagtgattttaatccggcggcggtaaacaccagcgtggcggggctggggattgaactcaggcagaacgaccaaccctttacgttggggtccaccattacggtgaatgaacaatcgatacctgttctgaaagccataccggttaaaaagagcggtgcttcgctgaaagaaggcggcttcgatgcgacggcaacattacaggtggattatcagtaatggctaaaagacaggcgttattacacggcgcggcctgcatcctctgtggggcgctgatattgccggtctcagcggcagataacctgcatttttccggtagcctggtggccagtccttgcacgctcacgatgcaggggacggggattgccgaagtcgatttttcgtcgcttgacagttctgatttcactcccgacggccagtctgctcgtaagcctttggtgtttgaactcacggattgcgattcggcgctgagtaacggggtgcaggtgactttcactggaaccgaagcgaccggaatgcgcggtatcctggccatcgatagccattcaggtgcttttgggatcgggattggtattgaaacgctatccggcgttcccgtgggcatgaacgataaagagggtgcgatattcacgctggtgacggggaataacgcgctaaacctgaatgcctgggtacaacgccttcctggcgaggacctggttccgggaacgttcttcgcaagcgcactagttacctttgagtatttatgatgagaagcatacagattttatttttactgttggcggtcgtttgttgccgttcaatagcggcgggacccatgctgaaagcgacgttttcaagcaccacgatgtattatggtattggccctaatagcgacaaatctattgtggcggaggtgacgatagcgactccggagggggtgtactatggctcctggaacctttcgggacatcgtaaaggagaaacgctaaccgcagactcctggtctgggccagaacctgcgccgaaggttgtattgaaggattttgataacactgtttcgcgatctgcgtgcaagaatcttccctcgaactggagggggtgtggttcttttaccctggagattacggtacaaagcgatgattatggttgcccctggctggcgtcgagccatatcgttgctaccgcttttatcactaacgaaacgtattccccgccggatacgcgcagctcagtttgcccgaaagttcccgttgatacttttgatatctcctgggatgcgaacgtttcgaaacagaaaacaaccctcatgcttgatgccactggtggcacggtgaatcgcacgttacatacctatttgatggagggggggaaactgtgcgatggcagcaaatttgacaaccgtggcgcttattgccgttttgtctcatcgggtattacgctcaatgtgctgggctgcgaccagtcgagcgtcacgaccagcgccgttgatcatccgataaccgatgttgagcttcatgacattaatgtagcggtgaacacccgcaacattggctccgggcagttcacgtcgacctgtagcttccagtatattattgatgagctttaggggggctgggtgtttggcgaagattcacgctaacctggtatgaaccaaaaaaaagccgggtggcggcttcgccttacccggcctacgttgtttctggacgttctcttttacagtttcgcaaacacccgacgcgcggcgtcgatggtgttattgatatcttcttcactgtgcgccacggacataaagcctgcttcgaacgcggacggcgccagatatacgccttcctccagcatcaggtggaagaaacgcttaaagcgttccacgtcgcacgccatcacgtcctgatagcaggttacgctctcagcgtcggtgaagaaaatcccgaacatgccgccgacatggttaaccaccagcggaatattcgcttcttcggcagcttccagcaaaccttccgccagacgggtggtgagctcatccagcgtttcatgaatgccgggctgggcgacttcattcaggcaggcgaaaccggccgccatcgcaatcgggttgccggaaagggtgcccgcctggtaaaccgggcccgtcggcgccagcgcatccattacatcgcgacgaccgccaaacgcgcctaccggcatcccgccgccgatgattttacccagacaggtcaggtcaggcacgacgccgtagtaatcctgggctccggccagcgctacgcgaaaaccggtcatcacttcgtcgataatcagcagcgcgccgaactcatcgcacaaggcgcgcaggcctggcagaaattccggcagcggcgggatgcagttcatattgcccgctacgggttcgacgatgatacaggcgatttcctgcggatattgttcaaacgccgcgcgcactgacgtcagatcgttataagtgcaggtcagcgtatgtttcgcgaaatctgccggcacgcccggcgagttcggctgaccgagcgtcagcgcgccagaaccggctttgaccagcagacagtctgcgtggccgtggtagcagccttcgaatttgataatcttatcgcggccagtaaaaccacgcgccaggcgaatagcgctcatcgtcgcttcggtgccggagttcaccatgcgcaccatgtccatggtcggcaccaggttggtcaccagttccgccatttttacttccatttcggttggcgcgccgaagcttaaaccgcgctccgcagcttcgatcaccgcattgcggatagccggatggttatgccccagtaccattggtccccaggaaccgacatagtcgatatacgctttgccatcgacatcgtacagatacgcgccgtccgctttttcgataaacagcggggtgccgcccacgccagtgaaggcgcgaacaggggagttcacgccgccggggatcagctcgcgggccgcgctatagagattttcagacttactcatggaaagattcctggttcgtagaaaaagtgaatacccgctattctaagttattcagagaaggttatgaaagttttacgcatttgaaacaatacgatttgcaggggattttcacggcgttggcgagtagaatgccgactttagatttgtattaccaattaatgatcttctgatgaaaacagacacttccacctttttagctcagcaaattgtgcgtttacggcgcagagatcagattcgccggttaatgcagcgggataaaacgccgctggccatcctgttaatggcggccgttgtcggcacgcttaccggactggttggcgtcgcctttgaaaaggcggtttcctgggtacaaaacatgcgcattggcgcgctggttcaggtcgcggaccatgcgtttttgctttggccgctggcctttatcctttcggcgttactggcgatggtcggctactttttggtgcgaaaatttgcgccggaagccggcggctcgggtatcccggaaattgaaggcgcgctggaggagttacgtccggtgcgctggtggcgcgtgttgccggtgaagtttatcggcgggatgggaacgttgggcgcaggaatggtattagggcgcgaagggccaacggtgcaaatcgggggcaacctggggcgcatggtgctggatgtttttcgtatgcgcagcgccgaagcgcggcatacgttgctggcgaccggcgcggcggcggggctctctgcggcgtttaacgcgccgctggcgggtatcctgtttattattgaagagatgcgcccgcagtttcgctacaacctgatttcgattaaagcggtgtttaccggcgtcatcatgtcgagcattgtgttccgcatatttaacggcgaagcgccgattattgaagtcggcaaactgtctgatgcgccggttaacacgctgtggttataccttatcctcggcattatttttggctgcgtcgggccagtatttaattcgttggtgctgcgtacccaggatatgtttcagcgctttcatggcggcgaaattaaaaaatgggtgcttatgggcggcgcgatcggcggcctgtgcggtattctggggttgattgagccggaagcggcaggcggcggatttaaccttattcctatcgccgcggcaggtaattttagcgtcgggctactgctgttcatctttattacccgggtggtcacaacgctgctttgcttttcttccggcgcgccggggggcattttcgccccgatgctggcgctgggaacgctgcttggtacggccttcggtatggcggcggcagtgcttttcccgcagtatcacctggaggccggtacctttgcgattgccgggatgggggcgctgatggcggcgtcggtgcgcgccccgctgacggggattgtgctggtgctggagatgaccgataactaccagctcattttgccaatgattatcacctgtcttggcgcgacactattagcccagtttttgggcgggaaaccgttatactcaaccatcctggcgcgcactctggcgaagcaggatgcggaacaggcggcgaaaaaccagaatgcgcctgcgggcgagaatacttgaacgaattactagggtattagataatgactgccaatattgggtgaaaatttatccaattaccgatgtcgtttggagcaaaatatgagtgatgacgtagcgctgccgctgcagtttaccgacgcagcagcgaataaagtaaaaagtcttatcgctgacgaagataacccgaatctgaaactacgcgtgtatatcaccggcggtggttgcagcggcttccagtatggttttacctttgacgatcaggttaacgaaggggatatgaccatcgaaaaacagggcgttggcctggtggttgacccgatgagtttgcagtatctggtgggtggttcggtcgattataccgaaggcctggaaggttcccgcttcattgtaaccaacccgaatgcgaaaagtacctgcgggtgtggctcttccttcagtatttgattgctgttcgttgtgccggatggcgacgcgagcgtcttatccggccgacaggaaagatgttccaggcccgataagcttagcgccatcgagcaaaacaatatcaacgtccgttttcatccagggcaaacgtcggcaatttcaaatgccagcgaatggccgccaggcgaatgaacagcgtgacgaccatacccatcatgctggcgctttccagcggtactgaaaacgtataaaacgcggtggcgtgaacaatcccgccgataatacaggccgtggcatagatttcggtgcgtaggatcatggggatctcacgtgccagaacatcgcgaataatcccgccgccgacgccggtaatcacgcccatacagacggccactaatggccccgtttcagcgaggaaggctttattcaccccaatgccgacaaacaccgccagcccgaccgcatccagcaccggcaacatccatttcggcagacgtcttggctggcgaaccagcaggatggtcagcatactggtgaccatggcgacgaccaggtcggtaggatctttaacccagaataccgggccgttatccagcgccatatcgcggattgtcccgccgccgacggcagtaacgacgccgagcaccaggacgccgaacggatccatacgtaatttcccggccagcaacacgccagagatagcaaatacagccgtgcctacaatatccagccaatagacgagcattgtcgaatccccactgggagcctggtaagacaggctctaattcacctgtgaaagcgcattacagagttgttttgcggcgaggataatacgcgggcttgcgcgttcaaaccagtcgctgttaagcggaataaccggaatttttaacaggtttccccagtattgttcaattttgagaatttcgcccgcttttccggccacgataatggcctggggatgccttgccagcacctgttcacggctgacttgcggccacggcacgcggctgtcagcaaagacgttttctccgccgcaggtcgtcaaaacctgatgttgaatagaccctttaccactggtaaacagaggattcatgccaaactgaagaaagacgcgctttttagctttaccggcatactcggcgttgagcgcggcgtactcgtttagcaatgtctgcgctgcctgctgagccttttccggctgcgggctccaggcggccagttggcggagcgtgtcggcgatctgttcgatgcttaccgcgtccacccacatgaccttaatacctaatgacgtcagttggtttacctggcgttccgcattaccgccgcgccaggcgacgaccagatccggcttcagcgccacaatgcgttccagattcattccctgccaggtagagacctgttctattttttgcgcttcgggcgggtagtcggaatagctgctgacgccaacgggcgtaatcccggcggcaaaagcaagctccgtattggcgggagagagggtaattacgcgcggcgcagcgtaaagccacaccgggagcgtaagcagcagggcgaccagcgccctgaacatttgcttagccatgcgccagtttctgtaccagcgtttcgaccatcagagtcgactgtttcgccgccaccgcgaggaattcgtcaaagctgaggtgcgattgctgatcggccacgtcagaaatagcgcgtaccaccacgaacggcacgctgaagttatagcagacgtgggcgatagcggtggcttccatctctacggcgaccgcgtcggggaagttatgccgaattttcgccagcccgacggagccgttaataaacgcgtcgccgctaacaataaggccgcgtaccgcgttcagattcaactccctgatgcaggattccgcggcggcaatcagtttgtcatcggccttaaatccggccggacagcccggtaattgcccgtattcatagccgaaagcggtcacatcagcgtcgtggtaacgcgcttcgtcagagacgacgatatcgccgaccttcagcgtggacgccagaccgcctgcggaaccggtattgatgatcacgtccggcttgcagtgctccagaagcaacgttgcgcccagcgccgccgcgactttaccgataccggatttcagcaacgccacttcggtgccgttcaactggccagtgtaaatttcgcagccgcccagcgtaatcgtctgacggttgtcaattttgtcacgcagcagcgtaacttcttcttccattgcgccaatgatgccgattttcatagatttactcgcgataagtcagttttgggggcatagtttatcatgcgcttatggggaagcgcatttctcaggcggggagaggatatggcatcgatcgatttccgaaataaaattaactggcatcgtcgttatcgttcaccgcagggcgtaaagacggaacatgagatcctgcggatttttgaaagcgatcgcgggcggattatcaactctccggctatacgccgtttgcagcaaaaaacgcaggttttcccgctggagcgcaatgccgcggtgcgtactcgtctgacgcattcgatggaggtgcagcaggtggggcgttatatcgcgaaagagattttaagccgcctgaaagagcaaaaccgactggaggagtacggtctggatgcgctgaccggtccctttgaaagtattgtggaaatggcctgcctgatgcacgacatcggtaatccgccgttcggtcattttggcgaggcggcgatcaatgactggtttcgtcagcggctgcatccggaagatgcggaaagtcagccgctcacgcatgatcgctgtgtggtttcctcgctacggctacaggaaggcgaagaaaatctgaacgatattcgccgcaaggtacgtcaggatatctgccattttgaaggcaatgcacagggaattcgtctggtacatacgctcatgcggatgaatcttacctgggcgcaggttggcggaattttaaaatatacccgtccggcatggtggcgagggccggtgccggattcccatcgctatttaatgaagaaaccgggctattatctttctgaagagaagtatattgcgaggttacgtaaagaactgcagttagcgccttacagtcgctttccattaacgtggattatggaagccgcagatgatatttcttattgtgtcgccgatcttgaagacgcggtagagaaaagaatctttagcgttgagcagctttatcaccatttatatcacgcgtggggccaccatgagaaggattcgctgtttgagctggtggtaggaaatgcgtgggaaaaatcacgcgccaatacattaagccgcagtaccgaagatcagttttttatgtatttacgggtaaatacattaaataaactggtgccctatgccgctcagcgttttattgataatttgccgcagatttttgccggtaccttcaatcaggcgctgctggaagatgccagcggttttagccgcctgcttggactctataagaatgtggcggttgaacatgtgtttagccatccggatgtagaacagcttgaactacagggataccgggtgatcagcgggttattagatatctatcagccgctattaagcttgtcgcttaacgactttcgcgagctggtggaaaaagaacggttgaaacgcttccctatagaatcgcgcttatttcagaaactttctacgcgccatcgtttggcctacgtggaagtcgtcagtaaattacccacggattcggcggagtacccggtactggaatattattatcgctgtcggttgattcaggattatatcagcgggatgactgacctttacgcatgggatgaatatcggcgtttgatggcggtcgaacagtaaatggacttttgtaaagatggacaataaatttttactttttccagaaactttgttccggaacttcgcgttataaaatgaatctgacgtacacagcaattttgcgttacctgttaatcgagattgaaacacatgaaaaaaaccacattagcaatgagtgcactggctctgagtttaggtttggcattgtcgcctctgtctgccacggcggctgaaacgtcctcttcagcaatgactgcccagcagatgccaagcctggcaccgatgctcgaaaaagtgatgccatcggtggtcagtattaatgttgaaggtagcaccacggtgaatacgccgcgtatgccgcgtaatttccagcagttctttggcgatgactccccgttctgccaggacggttctccgttccagaattctccgttctgccagggcggcggtaacggcggcaacggcggtcagcaacagaaattcatggcgctgggctccggcgtaattattgacgccgcgaagggctacgtcgtcaccaacaaccacgtggttgataacgccagcgtgattaaagtacagcttagcgatggacgtaaattcgatgctaaagtggtaggcaaagatccgcgttctgatatcgcgctgattcaaattcagaatccgaagaacctgacggcgattaagctggcggactccgacgcgctgcgcgtgggggattataccgtcgctattggtaacccgtttggtctgggcgaaacggtgacgtcaggtatcgtttcggcgctggggcgtagcggcctgaacgtagaaaattacgagaattttattcagaccgacgccgcgattaaccgcggtaactccggcggcgcgctggtgaacctgaacggtgagctgatcggtattaacaccgcgattctggcgccggacggcggcaacatcggtatcggcttcgctatccccagtaacatggtgaaaaacctgacgtcgcagatggtggaatacggccaggtgaaacgcggcgaactggggatcatggggactgagctgaattccgaattggcgaaagcgatgaaagtcgacgcccagcgtggcgcgttcgtcagccaggtgatgccgaattcgtccgcggcgaaagcgggtatcaaagccggggatgtcattacctcgctgaacggtaaaccgatcagcagctttgcggcgctgcgcgctcaggtcggcactatgccggtcggcagcaaaatcagcctcggtctgctgcgtgaaggtaaagcgattacggttaatctggaactgcagcagagcagccagagtcaggttgattccagcaccatcttcagcgggattgaaggcgctgaaatgagcaataaaggccaggataaaggcgttgtggtgagcagcgtgaaagcgaactcacccgccgcgcaaattggcctcaaaaaaggcgatgtgattatcggcgctaaccagcagccggtgaaaaatatcgccgagctgcgtaagattctcgacagcaagccgtcggtactggcgctgaatattcagcgtggtgatagttctatttatttgctgatgcagtaatcacctttgtcccccttccaccacggaagggggcaacacttttctgtgaaactccccacaactccatacttctttgcaccgttttgtgcatttgcacaatgtcgaggcctgtcatcttccttatgcttgtgctctgctcacaggagggatttatggctggctggcatcttgataccaaaatggcgcaggatatcgtggcgcgcactatgcgcatcatcgataccaatatcaacgtaatggatgcccgcgggcgtattatcggcagcggcgatcgggaacgtattggtgaattgcacgaaggcgcgctgttagtgctgtcgcagggccgggttgtggatattgacaacgccgtggcgcgacacctgcacggggtgcgtcaggggattaatcttcccttacgtcttgagggcgaaattgtcggcgtgatcggcctcaccggcgaaccagagcatctgcgtaaatatggcgaactggtgtgtatgactgccgaaatgatgctggagcagtcgcggttaatgcaccttttggcgcaggatagccgtttgcgcgaagagctggtgatgaacctgattcaggccgaagaaaatacgccggcgctggtggaatgggcgcagcgtttggggatcgatttgaaccagccgcgtgtggcggcggtggtggaagtcgacagcggccagcttggcgtcgatagcgcaatggcggaacttcagcagttgcagaatgcgcttaccacgccggagcgtaacaacctgatagccattgtttctctcaccgagatggtggtgctcaaacccgccttaaactcgtttggtcgctgggatgctgaagatcatcgtaagcgcgtagagcagcttatctcgcgaatgaaagagaatggtcagctacgttttcgcgtggcgctgggcaattactttaccgggccgggcagtattgcacgttcataccgcacggcgcgcactacgatgatggtcggcaaacagcggatgccagaaagccgcagctatttttatcaggatttgatgctgccggttctgttagatagcctgcgtggcggctggcaggccaatgagctggcgcgcccgctggtaaaactcaaagcgatggataacaacgggttattacgtcggacgctgacggcgtggtttcgccataatgtccagccgctggcgacctctaaggcgctgtttattcatcgtaacacgctggaatatcggctaaatcgtatttcggaactgaccgggctggatttgggaaattttgacgatcggctgttgctgtatgtggagctacaattggatgaacagcgttaagcccggcggcgcttcgttgaccagagcagggaaattgggcgaagtggtaggccggattaggcaaagccgccatccgacaacgtaatctcacagcgcccgaagacgctgtgatggggggggtaattcgtggtcaggcgctgtaatccccgcgccgtgacctgccagatcacgtgttgcggctgcggccagctttcgccattgagcgggttgcggataaccgactggtctgcgccctcggcatgaaagacctcaatcgtataatcctcatccagcccgcagacgtcagtatagccgccaagctgcaccgaaccttttatcgactgacggtaaaccaccgtaccgcgcgtattataaatcgtcactgccgcatattccgttgcgaagtcgctatgcggcgcaattgggtatgcggtaaagataaattgttgcgcacggatgtctatttccatactggcaaaaccattttcttccttgccaataagctgccagctgaatttatcgccatataatgcggcagcatcggaggtatttttctcttccgtttgttccggtgagtcgacctccagcccatcgctcaccacgcgccagcggttgtgttttttcagcctgacgttttgcccggtcgtttcattgatggcgctgcaacggtaaggttcgtcatggaagagctcaatgtacattcccgcttgcaaaacaaccgtatcgctatcggctgaatagtgggtgatgccatcataatgacggctatagataacctcgccggactcctcctttatcgtgagcgtgctgtatgtcgcggtatagtagggatgaggctgcccggccagtgtttctattgtcatgcgctgttgccgattatcgtaagcaagctggcaaaacgttctgtcgccttgtccgcgtaactgcaacgtcacgcctttaccgatgccttcgcccggctcgctgttatccgccggcagcacatcaacgctgtcgcgcattaacgcgctacgggtcggctcttcaatatgggagagcatcagccagagatcgtttttgcaagcggcataaggttgcgccattaataaagggcaggcgcggatagcatctgcgcgatgggtaaacatagcctggagatctgcggcaggatcgttgttgagcgaaaaatgataaagcccttcgctatcaagacgcagtaactgatatttcgtcgacgagaccaatgtcagatagcccggcgaggctttcaggcggccaggctcggcatgataaagataaaggtggtagtggtcgctaaacggcaccacaatttttccggtggcgcagtttattccgttcatcttacgttcaaaaaccttttcgccgctggcggttaacaccgttatgctggcgtataacgtattcgcgaagtagctgtgctgcgtggcgttcgtgatatccagaactaattgtctggcctcatgatccacggctaaacgggcgaagggcatgtcaccgtagccgaggaaaatcaactgctcgttatacgcggcgctgtcctgcaaggcggtgaaattaacggtaagtgcgttttccccttcgcggataaccacatagtccgtgtccgggcggtatttctgcgatcgccctttgggcagggtgagatggtaaatgccaatgggcaggggagttaacgtgagcgtactgtcgttgacgggcaatgtatacgtgctgccggcgttgtcgtgtagcgttaaggcgcgtccataaagttgctccggctgatcgatattcagcgttagcgtgagcgttcccgttttgttcagctccgccagttcggcgttttcaaccagccagacaaaagagtccagccctaactgttggcgcgcgctttcccattcgcgctccggcaacagatcgtaaagcggccagacgggttttaccgcctgtgcggcgatctgctcgcgggtgaacgcatcgaccggtaagccgcacagctgaataaacggcgcgacgtcataacctgaggctgtggcgatggcgtccgccagcagatcggtcaggcgatgctcgcagggcaaaaagttttcgtcagcacccagctcgcggtagttctggttaaacactcgaaaggcttctgttccgcctttaaataacatcagcatcagaaattgcaggcgggggcggacgccccaggcgttaaccggcgtgcgattccgcagataggtaatgaattgcaattcctgctcagactgccgtccgtaattgtagagccagccgtcggtataaagatggttcccctggttcaggttaagctgctggaaaaacgcggcgtaaatgttgttccacacctcaccgactggcaggtcgacgtcattcataaagacgccctgatagccgtgaccgatttcatgcagaatcgtccactgcgtggcgacattatcgatccacccctggcttaatgttgcagccgtttgcgcgcaccaccaggggagataataagccgcgccgacgccgtgtttatccgctttaataaaatagcggttagcgacattttgattaagcggcgaagcagggctatcgctgagaccagtccagccattataggcgtcgatcactcgcgtgtagtacgcatccagcgcggtgataccggcgttgatgacattagcgcgatccgcccagggcagcagaaaacgcacgcggtccagttccagtagggcaaaaggcgacgcctgttcttcccaggtctggaaaaaagcgtcttcggattgccccttacgccagtgtggcaaatttttattgctggttggctgtcggtagatcaccgaaaactcgccgccctgcgcaaaaaagagggtatcaataaagggaacggaatcgaccgttgtgctgatcgtttgccagttgccgttcagcgtaagcgatttctcacacgctgagtcattgcacagcagacggagtctggcgttaccggcgttgttatttggctggcggatttgcagctgcgtattcgctggcagaataaatcccagcgcctggcggtcgtgctcgcgccccttttcaaatttgatgttatccagtccgggggccgcaggcagcgaataacatgttagcgtgatttcctgagtcatataacctccataaatagggaggatgaacatagctttttatttttattaataaatacagcaggataacgaaatgatatgtatagagccgctgtgaggcatagtgatgaaaaatggcggtagccgtgaggcggatgagagggagcagcagagtgataggggctcgaaatgaagccccggcagcttttttatttgcgggtaagcttgtccagatcggcttcgatttcactgatcttattcgcgacgacgctttccaggtggcgcaagtcgtcaaggatcttacgtttgagatcgagttctgagcggtcgcgctggcagatttggtccagctcgtcaatcacatagcgtaggttagggctaatctcctgtacttctttataaccctgaccgatgccatcggccaccaccgttttacgctggcgtggatacttaaacttcacgcttttagcaaagaattcacctctatccttttgaaaatagattttcaggatatcgttattggcttcttgccgcaggctgtaacgatcgatttcctcaggattggtaatgcccagactttttagattgtcatacatagcggtatccttcatcacactataacttttgaataattaacgaaaaattggtttttcgccaccaatgtatacaaaaaaagcgtagttgatcgcagaagacgtctcggcaacgtcatgagcaaaagggcggcggttattgatagcttaagtaattcaacgcgatattccgtttatagagaaagcgtttgaggtcagtgtgggaaattgaccggaggcagtggtcgataaccttgagaggcggaatctatgtccggaacgtataatgccactattcgccgggtggtgatttccgcctggataggaaactccattgaatattatgattttctattatatggcctggcaagcgcgctggtatttggcccgctttttttccctggcgccagcccattgactgcaacgttatcttcttttgccagtttcggcgtgggatttatttcccgaccgctgggcgcgctattttttggcaacaggggggatacgcttgggcgtaaaaacacgttattaatcacgttaggcgggatgggcgcggtcacgtttctcatcggttgcctgccttcttacgccagtatcggcgcgctggcgcctgctttactggttattctgcgttttctacagggatttatggttggaggcgaatggggaggcgccatgttgatggtcgtggaatatgctgctggaaagcaccgggggcggttaagcgcgctatcgcaaacaggaggactcacgggacaattattggcgacaggcgtatttatagtcgtgacccaattaccgaaggaggcgttgttatcgtggggatggcgtattccttttctgctcagtgcgcttttggtgttgcctggattatatatgcgtcatcgtctggatgagacgcctgtcttccgtgcgtttaaaaagcagcaggccattaatcataggcagcaaagagaagaaaggccggtggtcaaagtagtacgagaacaatggcgcagcattttgctgattataattctgcgttttgcggaaagcgttcccttttttcttgccaccgtcttcgcggtttcctgggcgacgacgcagcttgggattgccagcctgactattctgtacattgtaatgttcacctgtctgctggcgtatcccatgcacgtgctatttggcatcatgtcggatcggcgtggctgccgtcaggtgtatattttcggcgcgctttttgtcgcggcaatggcttttccctttttctggctgctggaaagccgttcgctcatactgatgacaatgggctacgttctgcttattaacattggtcataattcactgaatgccgtgcaaccttcttttttcgccggactgtttcatccgcctgtacgctacagcggttcatcaattggcgctcagttgggggcggttgtggcagggggattcacgccgtttatcgctaaagcgttaagcgcagtctatgataacagttggactttggttgccggttatgtcgttttgactgcgctggcttcggcgtttgcggcaaagattgcgccggaaaccgtgttaccgcattcgccgtaatgcaaaggggggctgtcgcccccgcttttcactcgcttaatcaatagtgcgcaataattcgttaatgcccactttaccacgcgttttggcgtcgacttttttcacgatcaccgcgcagtacaaactgtacttaccgtcttttgacggcaggttgccggaaacgaccacggagcccgccggtacgcggccatagtgaacttcaccggtttcgcgatcgtagattttggtgctctggccgaggtatacccccatggaaatgacggaaccttcttcgacaatgacgccttccacgacctcagaacgcgcgccaataaagcagttgtcttcaatgatggttgggttagcctgcagcggctccagtacgccgccgatacccacgccgccggaaaggtgaacatttttaccaatctgcgcgcaggaacccaccgtcgcccaggtgtcaaccatggtgccttcgtcaacgtaggcgccgatgttaacgtaagacggcatcagcacggtgttgcgggcgataaatgcgccctgacgaacggccgcaggcggaacgacgcggaagccttctttctgaaaacgcgcttcgtcgtaatcagcgaatttcatcgggactttatcgaagtagcggctttccgcaccgtcgataacctggttatcgttaatacggaaagagagcagaaccgctttcttcaaccactggtgagtgacccactgaccgtcgattttttctgcgacacgcagcgcgccggaatcaagtagagaaatgacctgttttaccgcctctcgggtcacggtatctacattagccggcgtaatatcggcgcggcgctcaaaagcggtctcaataacgttctgtaactgctgcattgttaaactctttcatataaataaacacactaccctttatcgtttggattgagggccgctgtcaaccgttgttgcacctcaagttgcagcacattattaagtgcgcgccgatccgctgtggcgattatgaataaatcttctactcgttcaccaatggttgtaattcgggcgccatgaagcgaaattcccagatcggcaaaaatttgtccgaccctggccagcagaccaggctgatcgagcgcgatcaattccatgaatgattttctgtcggtatgggtgggcaaaaaattgacttccgtttcgaccgtaaagtgccgtaactttgccggttgccgacgcggctgcggcggctgccagctacgctgcgtaatggtttgttcaagaccggtgcgaataacgtcatggcgatccgccgccagcgggctgccgtctggttccagaacaataaacgtatccattgccatgccgtcgcgagtggtaaagatctgcgcgtcatggacgcttaaattacgcctgtccagctcggcgcagacggcggcaaacagatagggtctgtccggactccagataaaaatttcggttccaccgcgcgtggcctgcggactgagcaacactaacggttggcgcagatcgtgctgcaataaatggcgtgcgtgccaggcgagctgatttggactatgacgaacaaaatagttagcgcgacagcgggtccagattttgtgcagcgcggcttcatcaatattgtccattcgcagcagcgccagcgcctgaagctgatggtgacgcacgcgctcacgcatatccggcgtattttgcattccacgcctgagctgtttttcagtggcgaagtacagctcgcgcagcaggctctgtttccagctattccacaaggtttcgttggtcgcgcagatgtccgcgacggtcaggcagaccagaaaacgcagccgtgtttcggtttgcacctcttcggcaaactgcttgatgacttccggatcctggatgtcgcggcgctgggcggtgactgacattagcaggtgttggcgcaccagccaggcgaccagttgcgtttcgcgtgagttcaaaccgtgcagttcggcgaaggtgagtacatcctgcgcgcccagtaccgaatggtcgccgccgcgtcctttcgcaatatcgtggaacagcgcggcgatcaggatcagttccggatggggaagccgcggccagagatcgacgcatagcggatggcgctggcgcgtctcttctttcgcaaagctctccagtttgagcattacgcggatggtgtgttcatccaccgtgtatgcgtggaacaggtcaaactgcatttgtccgacgatgtgtgaccactgcggcatataagcccacagtacgctgtggcgatgcatgggcagcaggccgcggctgaccgcgccgggatggcgcagcatactaagaaacagagtgcgcgcctccgggatgtaacacagcggttggctcaggtggcggcgggcgtggcgcaaatggcgtaacgtcgtagagtagatgccggtgatcgcgctattgcgcaccatcatataaaacatccgcaggatcgcttgcggttcgcggataaacagcgtgtcgtcacgcagatcaataagcgtgccgcgcagttgaaactcatcgtcaacaggacgtggtttttcatccgcaggtagcgccagaatcgcctcgtcaaatagctgaagcagcatctgattaagttcgctcacccggcgcgtaacccggaagtagtctttcatcatccgctcaaccggatcattgccctcgccgctgtagttaaggcgttgagcgacgcttaactggcggtcgaacagcaggcggttatcgtagcggctgaccaccagatgtagcgcaaagcgaatgcgccacaggatatgcaggcactcgttgagctccgcgcgctcagcgggggttaaaaagccgaatcccaccatctcatcgagcgaggtagcgccgaagtgacgtcgggcgacccactgtaacgtatggatatcgcgcaggccgccggggctgcttttaatatccggctccagattatagctggtaccgtgatagcgctggtggcgctggttctgctcttctactttggcggcgtaaaatttgtcggacggccaaaaaccttcgctgaaaatatgtttttgtagtgccagaaacagagcgacatcaccgatcagcaggcgcgtttcgatgaggtttgttgcaacggttaaatcagacagaccttccagcagacactcttccagcgtacgtacgctatgcccgacatccagcttgacgtcccataataaagtcagcagctcgccgaccttttgcgcctgttcatcaggcagctttttgcggcttaaaatgagcagatcaatatcggaaagcggatgcagttcaccgcgtccatagccgccgacggcgaccagcgccagatcggcaatctgaccgaaaccggcctcaatccacaggcgttgcaataactggtcgataaattcggttcgggcttcaataagctgttcagcacaaatgccgctgtcaaatgcctctcccagccagtgttgaaagatgtcgatgcgggctttgataccggcgacggtcagttcagcgcgcggccagacgccagggttttgcggctggtcagggagggtggggagtgcggtattcgcgtgctgttcaggaagagtattcatatgcgccacccattaaaaagccggataatggcgtgaacgccttatccggcctacgtatttactcttcatccttcaagttgcttctacgttggctgcgctcgttcactccagtcacgtacttatgtacgctcctgaagattcactctcttgccgccttgaggcaactcgaatgattttgagtaaaggtgtaatttgtaggcctgataagatgcgaaggcatcgccatcaggcaaaacattattcgtcgtgtgtgatgatcgccgggatggtgtcatctttacgcagcgtcagaatttcacagccgttttccgttaccacaatagtatgctcgtactgagcagacaagctgcggtctttggtttttaccgtccagccgtctttcatggtgcggatacggtaatccccggcgttcagcatcggttcaatggtaaaggtcatgccaggctgcaacacgacgccgccatcgtctgcatcataatgcagcacctgcggttcttcatggaagccgcgaccaataccgtgtccgcagtattcacgtaccacggagaaaccttcgccttcggcatatttctggatggcggcgccaatggtgcgcaggcggatgcccggtttcaccattttgatgcccagatacaggctctcttgcgtgacgcggcacagacgctcgcccagaatggtcggtttgccgacgataaacatcttcgaggtatcgccgtggaattcatctttaatcacggtcacgtcgatgttgacgatatcaccatctttcagatgtttagcgtcatccggaatgccgtggcacaccacttcattaatagagatacagacggatttcggatagccgtggtagccgaggcaggcggagatcgcgtgttgttcgttaacgatgtaatcgttacagatacggtccagttcgccggtggtgacgcccggtttgatatacggttcgatcatttccagcacttcggctgccagacggcccgcgacgcgcattttttcgatgtcttcagatgtcttgatagagatagccatgaattctgtccatcagtgccgatgatttcggcaataattgtgtaagtgctgacaatggtatcagtcaggggtgtgccctgccaaattgagaatcattctgaacttcgcctttcgtgccacaggtgcgttggcgacattttttcaccccagtcacttactggccgtaagctcccggggatgcaaaaatttgccgcctgcctgtaacacgaaattcatcgttcaattcagcactgagtgccaacaattattggtgtcggtggcgtatttgtggtataaagcgcgccggacttccgatccattcgaagactacacacgatggacgggagcgacaaatctcactttgtgtaacaacacacacgtatcggcacatattccggggtgccctttggggtcggtaatatgggatacgtggaggcataaccccaacttaatctatagaggttttaaatcatggcaactgtttccatgcgcgacatgctcaaggctggtgttcacttcggtcaccagacccgttactggaacccgaaaatgaagccgttcatcttcggcgcgcgtaacaaagttcacatcatcaaccttgagaaaactgtaccgatgttcaacgaagctctggctgaactgaacaagatctctgctcgtaaaggtaaaatccttttcgttggtactaaacgcgctgcaagcgaagcggtgaaagaagctgctaacagctgcgaccagttcttcgtgaaccatcgctggctgggcggtatgctgactaactggaaaacagttcgtcagtccatcaaacgtctgaaagacctggaaactcagtctcaggacggtactttcgaaaagctgaccaagaaagaagcgctgatgcgtactcgtgagcttgagaaactggaaaacagcctgggcggtatcaaagacatgggcggtctgccggacgctctgttcgttatcgatgctgaccacgagcacattgctatcaaagaagcgaacaacctgggtatcccggtatttgctatcgttgataccaactctgatccggacggcgttgacttcgttatcccgggtaacgatgacgcaatccgtgctgttagcctgtacctgggcgctgtcgctgcaaccgttcgtgaaggccgttctcaggatctggcttcccaggcggaagaaagcttcgtagaagccgagtaataaggcttgataactccctaaaatagttcgagttgcaggaaggcggcaagctcgagaattcccgggagcttacatcagtaagtgaccgggatgagcgagtgaaggcaacgcgcctgcggctcgaaatatgaaggggagagcccttatagaccaggtagtatcacgtttggttagggggcctgtatatggccccctttttcacttttatatctgtgcggtttgatgccgggcagatcaaatctttcgaggattttagaatggctgaaattaccgcatccctggtaaaagagctgcgtgagcgtaccggcgcaggcatgatggattgcaaaaaagcgctgactgaagcgaatggcgacattgagctggcaatcgaaaacatgcgtaagtctggcgctatcaaagcggcgaaaaaagcaggcaacgtggctgctgacggcgtaatcaaaaccaaaatcgacggcaacgtcgctttcattctggaagttaactgccagactgacttcgtggctaaagatgctggcttccaggcatttgctgacaaagtgctggacgccgctgttgctggcaaaatcactgacgtagaagtcctgaaagcgcagttcgaagaagagcgcgttgctctggtagcgaaaatcggcgagaacatcaacattcgtcgcgtcgcttccctggaaggcgacgttctgggttcttaccagcacggtgcgcgcatcggcgttctggttgccgctaaaggcgctgacgaagagctggttaagcagctggcgatgcacgttgcggcaagcaagccggaattcgttaagccggaagatgtgtctgctgacgtggtagagaaagagtaccaggtacagctggacatcgcgatgcagtccggtaagccgaaagaaatcgcagagaaaatggttgaaggccgcatgaagaaattcaccggcgaagtttctctgactggtcagcctttcgtcatggaaccgagcaaatctgttggccaactgctgaaagagcacaacgctgacgtgactggcttcatccgctttgaagtgggcgaaggcattgagaaagtcgagactgactttgcagcagaagttgctgcgatgtctaagcagtcctgattttcctgaggagccgcctgagggcggcttctttttgcgcctctcttgtaaaatcagccgacgcctggcgtctgcgctgaaatgcgacgtacaatgtcgccggaattaactcatatcaatcgttgacagtctcaggaaagaaacatggctaccaatgcaaaacccgtctataaacgcattctgcttaaattaagcggcgaagctctgcagggtacggaaggcttcggtattgatgcaagcatactggatcgtatggctcaggagatcaaagaactggttgaactgggtattcaggttggtgtggtgattggcggtggtaacctgttccgtggcgcgggtctggcaaaagcggggatgaaccgcgttgtgggcgaccacatgggcatgttggccaccgtcatgaacggcctggcaatgcgtgatgcgcttcaccgcgcctatgtgaacgcccgcctgatgtcggcaattcctttaaacggcgtgtgcgacaactacagttgggccgaggcgattagcctgctgcgtaataaccgtgttgtgattctgtctgcaggtacgggtaacccgttcttcactaccgactctgcggcctgtctgcgcgggatcgaaattgaagcggatgtcgtactgaaagcgaccaaagtggatggtgtattcactgccgatccggcaaaagatccttccgcgaccatgtacgatcagctgacctacagcgaagtgctggataaagagctgaaagtgatggatctggcggcgttcacgctggctcgtgaccacaaactgccgattcgtgttttcaacatgaacaaaccgggcgcgctgcgtcgtgtggtgatgggcgaaaaagaagggacgttaatcacggaataattcccgtgagcgccaaatacgggtaagattctgttctattgacgggtcttattacctggcagaaattaaacgagactatacttagcacatctttatattgtgtgaccgtctggtctgactgagactagttttcaaggattcgtaacgtgattagcgatatcagaaaagatgctgaagtacgcatggaaaaatgcgttgaagcgttcaaaacccaaatcagcaaagtgcgcacgggtcgtgcttctcccagcctgctggatggtattgtcgtagaatactatggcactccgaccccgctgcgccagttggcaagcgtaacggtagaagactcccgtaccttaaaaattaacgtgtttgaccgttctatggggccagccgttgaaaaagcgatcatggcgtcagacctcggtttgaatccaagctctgcgggcaccgacattcgcgttccgctgccgccgctgaccgaagaacgtcgtaaagatctgacgaaaattgtccgtggcgaagcggagcaggcgcgtgtcgccgttcgtaacgtccgtcgtgatgcgaacgataaagtaaaagctctactgaaagataaagcgatcagtgaagatgacgatcgtcgctctcaggaagaagtacagaaaatgaccgacgcggcaattaagaaagttgatgcggcgttggcagataaagaagcagaactgatgcagttctgattgatctgtacgcagatataaactcattccaccgctaacctggcggatgagtggtgtacaaagcgccgcgcagaagacattatcaggtctcctgtgcggcgttttgctttttattccgtttcaacacttctggacgtttcatgaagcaattaaccattctgggctcgaccggctctattggttgcagcacactggacgtggtgcgccataatcctgatagcttccgcgttatcgcgctggtggcgggtaaaaatgtcgcccgcatggcggagcagtgcctggagttctcgccgcgttatgccgtgatggacgatacgtcgagcgcagaacagctcaaaataatgcttcagcagcatggcagccgcaccgaggttctgagcggtcagcaggctgcctgtgagatggcggcgcttgatgaggtcgggcatgtgatggcggccattgtgggcgcggctggtttactgccgaccctggcggcgattcgcgcagggaagacgattctgctggcgaataaagaatcgctggtgacctgcgggcggctgtttatggacgaagtaaaacgcagcaacgcccggcttttacccgtcgatagcgaacataacgcgatttttcagagtttgccgcaatctattcagcataatctgggatacgctgaccttgagcaaaatggcgtaacgtcgattttgcttaccgggtctggtggcccgtttcgtgaaacgcccatgtgcgatctggcagcgatgacgccggatcaggcatgtcgtcatccgaactggtcgatggggcgaaaaatctccgtcgactccgccaccatgatgaataaaggtctggaatacattgaagcgcgttggttatttaatgccagcgcacgtcagatggaagtgttgatccatccgcaatcggtcattcattcgatggtgcgttatcaggacggcagcgtcctggcgcagcttggagaacctgacatgcgtacgcctattgcgcatacgatggcatggccgaatcgcgtcacgtccggcgcgcagccgctcgatttttgcaaactcagcgcgctgacgtttagcgcgccagattatcagcgttatccttgcctgaagctggcgatggaggcgtttgagcaaggtcaggcggcaacgacggcgctcaatgcggcaaacgaaatcaccgttgccgcgtttctggcgcaacagattcgttttaccgatatcgccgggctcaatttagcggtgctggagaggatggatttacacgaaccggcaagcgttgaggacgtattgcaggttgacgccatcgcgcgtgaagtagccagaaaacaagtgatacggctctcacgctgacgattatcccgcgacagaagatcgtgctatttgttagcgttgggcttcggtgatatagtctgcgccacctgatcgcaggtttttggcttttttcggtcaggttagccgtggttttacacggcttttttgtggatacacaaaatcattcaggacgcatcgggacggcaggcgagtacgttcccggcgtgcgcagacagcgcacgacaggggcgatgacgcgcggtcatccgcgaagcgaaccgaagagaatgtgtataaaggcttcagtattcctgagtaccgctaaatcctttcagggacaaaaaacgcgttatgttgtctgcaactcaaccagtaagcgaaaatttgccagcgcatggctgccgtcatgttgcaataattatggatggcaatggtcgctgggcgaaaaagcaagggaagatccgggcctttgggcataaagccggggcgaagtccgtccggcgagcggtctcttttgctgccaataacggtattgatgcgttaacgctgtatgcctttagtagtgaaaactggaaccgaccggcgcaggaagtgagcgcgttaatggagctgtttgtgtgggcgctggatagcgaagtcaaaagcctgcaccgccataacgttcgcctgcgtattatcggcgatatcagccgattcaactcacgtttacaagaacgtattcgcaaatcagaagcgcttaccgcccataatacgggtctaacgctgaatatcgctgcgaattacggcggacgttgggatattgtccagggagtccgacaactggcggaacaggtgcaggctggagtgctgcgccccgatcagattgatgaagagagactaggccagcaaatctgtatgcatgagctggcgcctgtggatttagtaattaggactgggggagagcatcgcattagtaactttttgctttggcaaattgcctatgccgaactttactttacggatgttctttggcccgatttcgatgaacaagactttgaaggtgcgctgcatgcctttgctaatcgagagcgtcgtttcggcggtaccgagcctggtgatgacaaagcctgatgggggttgcttttgctgaagtatcgcctgatttctgcttttgtgttaatacccgcggtcatcgctgcgctttttttattgccgccggtggggttcgccattattacgctggttgtctgtatgctggccgcgtgggaatggggacagttaagcggtttcgccgcgcgttcacagcgggtttggctggcggtgctgtgtggtctgttattggcgctgatgctatttttgttgcctgagtatcatcacaacattcgtcaaccgctggttgagatgtcgctttgggcatcgttaggatggtgggttgtcgcgctactgctggtgctattttatcccggttcggcggcaatctggcgcaactcaaaaacattgcgtctcattttcggtttgttaactattgtgccatttttctggggcatgctggcgctgcgcgcctggcactatgacgagaatcattacagtggcgcaatatggttactctatgtcatgatcctggtctggggagcggactctggcgcgtatatgtttggtaaattgtttggcaaacataagctggcgccgaaggtttccccgggtaaaacctggcaagggtttatcggcgggcttgctacggctgccgtgatctcatggggctacggtatgtgggcgaatctgaatgttgcgcctgttatcttgctgatttgctctgtggtggcggctctggcttctgtactgggcgacctcaccgagagtatgtttaagcgcgaagcaggaattaaggatagcggccacttgattccaggccatggcggcattctggaccgaattgacagcctgacggctgccgtaccggtctttgcttgcctgttgttactggtgttcaggacgctctaacggaaggttttatgctgagtattctctggaatctggctgcattcatcatcgcactgggcgtgctgatcactgtgcatgaatttggtcatttctgggttgcccggcgctgcggtgtgcgagttgagcgcttttccatcggttttggcaaagcgctctggcgtcgtaccgatcggtacggcaccgagtatgtcatcgccctgatcccgctgggcggctacgtcaaaatgctggatgagcgcgccgaactggtagcgccggaattgcgtcgtcacgccttcaataacaaaacggtgggccagcgcgccgcaattattgccgcaggtccggttgcgaacttcatttttgctatctttgcttactggctggtctttatcatcggcgtccctggcgttcgtccggtcattggcgaaataacgcccaactcgattgctgcgcaggcgcaaattgcgcctggtacggaacttaaagccgttgatggtatcgaaacccctgattgggatgccgtgcgtttacaactggtgtccaaaattggcgatcagcagacgacggtgagcgtcgcgccgtttggtagcgaccagcggcaggataaaacgcttgatttacgtcactgggcatttgagcctgataagcaagatcctgtatcttctttagggattcggccccgcgggccacagattgaaccggtactgtcagaagtgcaggcgaattccgcagccagtaaagcgggtttgcaagcaggcgacaggatcgttaaagtcgatggtcagccgttaacgcagtggatgaaattcgtgacgtttgtacgcgataatcccggtaagccgttagcgttagagattgaaaggcaggggagcgccttgtcgttgacgttaacgccggatacgaaatcggttaacggaaaggcggaagggtttgcaggcgtggtgcctaaaattattcctctgccggaagagtacaagactatacgccagtatgggccttttagcgccatcctcgaagccacggataagacgtggcagttgatgaagctgacggtcagtatgctgggtaaattgataaccggtgatgtgaaactgaacaacctcagtgggccgatttctatcgctcagggggctgggatgtcagcggagttcggggtgatttattacctgatgttccttgcgctaatcagcgtgaacttagggataattaacctgtttccgctgcccgttcttgacgggggtcatctgctgttcctggcgattgaaaagcttaagggcgggccggtatccgagcgggttcaagactttagttatcgcattggctcgattttgctggtgttgttaatggggcttgcacttttcaatgatttctctcggttgtaagagagttagttaggaagaacgcataataacgatggcgatgaaaaagttgctcatagcgtcgctgctgttcagcagcgccaccgtatacggtgctgaagggttcgtagtgaaggacattcatttcgaaggcctgcagcgagtcgccgttggtgcggctctcctcagtatgccggtgcgcacaggcgacacggttaatgatgaagatatcagtaacaccattcgcgctctgttcgccaccggcaactttgaggacgtccgcgtcctgcgcgatggtaatacccttctggttcaggtaaaagaacgtccgaccattgccagcatcactttctccgggaacaagtcggtgaaagatgacatgctcaagcaaaacctcgaagcgtctggcgtacgtgttggcgagtctctggatcgcaccacgttgtctgatatcgaaaaaggtctggaagacttttactatagcgtaggtaaatacagcgccagcgttaaggcggtcgtcacgccgctaccgcgcaaccgtgttgatcttaaactggtgttccaggagggcgtatcggcgaagatccaacagatcaacatcgtcggtaaccatgcctttagcaccgaagaactcatttctcatttccagttgcgtgacgaagtgccgtggtggaacgtcgtcggcgatcgtaaataccagaaacagaagctggcgggcgaccttgaaaccttgcgcagctactatctggatcgcggctacgcgcgtttcaatattgactccacgcaagtgagtctgacgccggataagaaagggatctacatcaccgtcaatatcaccgaaggcgatcagtacaagctttccggggttcaggtgagcggtaacctggccggacattccgctgaaattgagaaactgacgaaaattgaaccgggcgagctctataacggcaccaaagtgaccaaaatggaagatgacatcaaaaagcttctgggtcgctatggttacgcctatccgcgcgtgcagtcacagcctgaaattaacgatgctgacaaaaccgtaaaactgcgcgtgaacgtcgatgcgggcaaccgtttctacgtgcgtaagatccgctttgaaggcaacgacacctcaaaagattccgttctgcgccgtgaaatgcgccagatggaaggggcgtggctgggcagcgacctggttgaccaggggaaagagcgtctgaaccgtctcggcttctttgaaaccgtcgacaccgacacgcagcgcgttccgggtagcccggatcaggttgatgtggtgtacaaggtgaaagagcgcaacaccggtagctttaacttcggtatcggttacggtacagaaagcggcgtgagcttccaggccggcgttcagcaggacaactggttaggtaccggttattccgtggggattaacggcaccaaaaacgactaccagacctacagcgaactgtccgttactaacccatactttaccgttgacggcgtgagcctcggtggtcgtatcttctataacgacttccaggcggacgacgcggatctatccgactataccaacaagagttacggtacggatgtgacgcttggcttccccatcaacgagtacaacacgttgcgtgctggtctgggttatgtccataacaaactgtccaacatgcagccgcagatcgcgatggatcgttatcttgagtcgatgggacaatctgctgataccagcagttttgccgctgatgacttcacctttaactacggctggacctataacaagcttgaccgtggttatttcccgacggacggctcgcgagtcaacctgacgggtaaggtgacgatcccaggttccgacaacgaatactacaaagtgtcgctggataccgcgacctatgtgcctatcgataacgatcacaagtgggtggttctggggcgtactcgttggggttatggcgatggtttaggcggcaaggaaatgccgttctatgagaacttctatgccggtggttccagtaccgtgcgtggtttccagtcgaatactatcggcccgaaagcggtctataaaaatggcgcccacactagttgggacgataatgatgattacgaagactgtactcaggaatcaggctgtaaatcagatgatgcggtaggtggtaatgccatggctgtcgccagcctggaatttattaccccgacgccgttcatcagcgaaaagtatgccaactcggttcgtacctccttcttctgggatatgggtaccgtttgggatacgaactgggatccgtcatctgcgccgtcagatgtaccggattacagcgatccaggcaacatccgtatgtccgcgggtatcgcattacaatggatgtccccattggggccgttggtcttctcctacgcccagccgtttaaaaagtacgatggagacaaagccgagcagttccagtttaacattggtaaaacctggtaattgttcactgcaaaggaatgcattggtagtgtagcgatgacttttggcgatgcccccagggatcgccaggccacgcaaaaagctgtaccttcgggtgcaaatgggatggtaaggagtttattgtgaaaaagtggttattagctgcaggtcttggtttggcgatggtaacgtccgcacaggctgctgacaaaattgcaatcgtcaacatgggtaatctgttccaacaggttgcgcagaagacgggtgtatccaatacactggaaaacgaatttaaaggccgtgcggctgaactgcaaaaaatggaaaccgatctgcaatctaaaatgcagcgtctgcaatccatgaaagcaggtagcgatcgtactaagctggaaaaagacgtgatgtctcagcgccagactttcgcgcaaaaagcgcaggcttttgagaaagatcgcgctcgtcgttccaacgaagaacgcaacaaactggtgactcgtatccagactgcggtgaaaaaagtggctaacgaccagagtatcgatctggtggtagacgcaaacaccgttgcttacaacagcagcgatgtgaaagacatcaccgctgacgtactgaaacaggttaaataagtaatgccttcaattcgactggctgacttagcagaacagttggatgcagaattacacggtgatggcgatatcgtcatcaccggcgttgcgtccatgcaatctgcaacaacaggccacattacgtttatggtaaatcctaagtaccgtgaacacttaggtttatgccaggcttctgcggttgtcatgacgcaggacgatcttccttttgctaagagcgcggcgctggtagttaaaaatccctacctgacctacgcgcgcatggcgcaaattttagatactacgccgcagcccgcgcagaatatcgcgccaagcgccgtgattgatgcgacggcaacgctgggtagcaatgtttcagtcggcgcgaatgcggtgattgaatctggcgtacaactgggcgataacgtggttatcggcgcaggctgtttcgtcggaaaaaatagcaaaatcggggcgggttcacgcttgtgggcgaacgtaacgatttaccacgacattcagatcggtgagaattgcctgatccagtccagtacggtgatcggcgcggacggttttggctacgctaacgatcgtggcaactgggtgaagatcccacaactgggccgggtcattattggcgatcgtgtcgagatcggcgcttgtaccaccattgaccgtggcgcgttggatgatactgttattggcaatggcgtgattattgataatcagtgccagattgcacataacgtcgtgattggcgacaatacggcagttgccggtggcgtcattatggcgggtagcctgaagattggccgttactgcatgattggcggcgccagcgtgatcaatgggcatatggaaatatgcgacaaagtcacggtaactggcatgggtatggtgatgcgtcccatcacggaaccgggcgtctactcctcaggcattccgctgcaacccaacaaagtatggcgtaaaactgctgcactggtgatgaacattgatgatatgagcaagcgtctcaaagcgattgagcgcaaggttaatcaacaagactaacgttccgccttgtagttgccattcttttccggcctgtcacattcatacgattgcggcaggccgtgttattattgcctttttgtatatttggacaggaagagtattttgactactaacactcatactctgcagattgaagagattttagagcttctgccgcaccgttttccgtttttactggtcgatcgcgtgctggactttgaagaaggtcgttttctgcgtgcggtgaaaaatgtctccgtcaacgagccgtttttccaggggcactttccgggcaaaccgattttgccaggcgtgctgattctggaagcgatggcgcaggcaaccggtattctggcgtttaaaagcgttggtaaactggaacctggcgaactgtattatttcgcgggtattgatgaagcgcgctttaagcgtccggtggtgccaggcgatcagatgatcatggaagtcactttcgagaaaacgcgccgtggcctgacccgctttaaaggggttgcgctggtcgacggtaaagtcgtgtgcgaagcaaccatgatgtgtgctcgtagccgggaggcctgattcgtgattgataaatccgcctttattcatcctaccgccattgtggaagacggcgctgtaattggcgctaatgcccacattggtcccttttgtattgttgggccgcaggtcgaaattggtgagggaaccgtactgaagtctcatgtggtcgtgaatggtcaaaccaaaatcggccgcgacaacgagatttatcagtttgcctccatcggtgaagtgaaccaggatctgaaatatgcgggtgagccgacccgtgtggaaattggcgatcgtaaccgcatccgcgaaagcgtcaccattcatcgtggtacagtgcagggcggtgggttgacgaaggtgggtagcgataacctgctgatgatcaatgcgcatgtcgcacatgattgtacggtagggaatcgctgtatcctcgccaacaacgccacgctggcggggcacgtatcagtcgatgattttgcgattatcggcggtatgacggcagttcatcaattctgcattatcggtgcgcatgtgatggtcggcggctgctccggcgtggcgcaggatgtccctccgtatgtgattgcgcagggtaaccatgcgacgccgttcggggtaaatatcgaagggctgaagcgtcgcggctttagccgtgaagggctggtggcgattcgtaatgcctacaaactgttgtaccgcagtggtaaaacgctcgacgaagcgaagctggaaatcgctgaacttgctgaaaagcatccggaagtgaaggcgtttaccgagttctttgagcgttcaacgcgcggtccgattcgttaatggcggcacagcgtcctttaacgattgccctggtcgccggtgaaacgtccggcgatattcttggcgcaggcttaattcgtgcgctgaaagcgcgcgtacccaacgcccgctttgtgggcgttgcggggccgcgtatgcaggccgaagggtgtgaagcctggtacgaaatggaagagctggcggtcatgggcattgttgaagtgctcggacgtttacgccgtttgttgcatatccgcgccgatctgacccgccgttttaccgagctcaagcccgatgtctttgtcgggattgatgcccctgatttcaacattaccctcgaaggtaatctgaaaaagcaagggattaagaccattcattatgtcagcccgtccgtttgggcctggcgacagaaacgcgttttcaaaataggcagatccacccatatggtgctggcttttctgcctttcgaaaaagcgttttacgataaatttaacgtcccgtgccgctttatcggtcacaccatggcggatgccatgccgctggacccggataaaaatgcggcgcgcgacgtgctgggtatcccgcatgacgcccattgtctggcgctactgccaggtagccgtggcgcggaagtggaaatgctcagcgccgacttcctgaaaaccgcacaattgctgcgacagcgctatcccgatctggaagtggtagtgccgctggtaaacgcgaaacgccgcgagcagtttgaaaaaattaaagcggaggttgcgccggatctcgccgttcatttgctggacggtatggcgcgcgaggcgatgatcgccagcgacgcggcgttgctggcctcaggcacggcggcactggagtgtatgctggcaaaatgcccgatggtcgtggggtatcgtatgaagcccttcactttctggctggcgaaacgtctggtgaaaacggagtatgtgtctttgcctaacctgctggcgggaagagaattagtcaaagagctgttgcaggaagagtgcgaaccgcaaaaactcgccgaagcgctgttgccgctactggcgaacggtaaaaccagccatgcgatgcacgacaccttccgtgagctgcatcagcagatccgctgtaatgccgatgagcaggcggcagatgccgtcctggagttagcacaatgatcgaatttgtttatccacacacccatttagtggcgggtgtggatgaagtgggccgtggcccgctggtgggcgccgtagtgaccgccgccgtgatcctcgatccggctcgtccgatcgtcggtctgaatgattccaaaaaattgtctgaaaagcgtcgtctgtcattgtatgacgagattaaagaaaaggcgttaagctggagtctgggacgcgcggaagcgcatgaaattgatgagctgaatattttgcacgccaccatgctcgccatgcagcgcgctgtcgctggtctgcatattgcgccagaatatgtgctgatcgacggcaatcgctgtccggaactgcctgtgccgtcaatggccgtggtgaaaggcgacagccgcgtggcggagattagcgcggcgtctattctggcgaaagtcacccgcgacgcagaaatggcggcgctggatatcgtttttcctcagtatggctttgcgcagcacaaaggctatccaaccgcttttcatctggaaaagttggcccagtatggcgcgacggcgcaccaccgacgcagttttgcgcctgttaaacgcgctctgggacttgtgtcctgattcttgtatcgagaaatctgaagatgtctgaaccacgtttcgttcacctgcgggtgcacagcgactactctatgatcgatgggctggcgaagaccgggccgctggtgaaaaaggcggcctcattaggtatgcctgcgctggcgatcaccgattttaccaacctctgcggtctggtgaagttctacggagcgggtcatggcgcgggcattaaacccatcgtcggggcggactttaacgttcacaacgaactgctgggagatgagctgactcatctgacggtactggcggcgaataatacgggataccagaacctgacgttgctgatctcgaaagcgtatcagcgcggctacggcgcggcaggcccgattatcgagcgcgactggctggtagagcttaaagaaggtttgatcctgctttccggcgggcgcatgggcgacgtaggccgctgtctgctacgcggcaaccaggcgctggtggaggagtgcgttgctttctatgaagcgcattttcccgatcgctactttctggaactgatccgcaccggcagacaggatgaagagacttatctccatgctgcggttgaactggctgaggcacgtggtttgccggttgtcgcgacaaacgatgtccgtttccttgaaagcgatgattttgacgcccatgagattcgtgtcgcgatccacgacggtttcacgctcgacgatcctaaacgtccacgcaattattcaccgcagcagtatatgcgcagtgaagaagaaatgtgcgagctgttctccgatattccggagtcgctggaaaatacggtggagattgccaaacgctgcaacgtaacggtgcgtctgggtgaatatttcctgccgcagttcccgaccggcgatatgaccaccgaagattatctggtcaaaaaagcgaaagaggggctggaagagcgtctggctttcctgtttccggacgaagaagagcgcaaaaagcgtcgcccggaatatgacgagcgtctggatattgaactacaggttatcaaccagatggggttccctggctacttcctcatcgtgatggagtttatccagtggtcaaaagataacggcgtgccggtagggccgggacgtggttccggggctggttcgctggtggcctacgcgctgaaaattaccgaccttgatccgctggaatttgacctgctgttcgaacgtttcctgaacccggaacgtgtctcgatgcctgacttcgacgttgacttctgtatggagaaacgcgaccaggtgattgagcacgtcgcagacatgtacgggcgtgatgcggtatcgcagattatcaccttcggtacgatggcggcgaaagccgttatccgcgatgtgggccgcgtgctggggcatccgtacggttttgtcgatcgtatctcgaagctggtgccgcccgatccgggcatgacgctggcaaaagcctttgaagcggaaccgcaactgccggaaatttacgaggcggatgaagaggtcagagcgctgatcgatatggcgcgtaagctcgaaggcgtcacgcgtaacgccggtaagcacgctggcggcgtggtcatcgcgccgaccaaaattaccgactttgcgccgctgtactgcgatgaagagggcaagcatccggttacccagtttgataaaagtgacgtggaatatgccgggctggtgaagttcgacttcctcggtttgcgtacgctgaccatcatcaactgggcgctggagatgatcaacaagcggcgcgagaaaaacggcgagccgccgctggatatcgccgccattccgctggatgacaagaaaagcttcgacatgctgcagcgctcggaaaccacggcggtcttccagcttgaatcgcgcggcatgaaagatctgatcaaacgtctgcagccggactgctttgaagatatgatcgcactggtggccctgttccgtcccggcccgttgcagtcagggatggtagataacttcatcgaccgtaagcacggtcgtgaagaactctcttacccggacgttcagtggcagcatgaaagcctgaagccggtactggagccgacctacggcatcattctgtatcaggaacaggtgatgcagattgcccaggtactttccgggtatactctcggcggcgcggatatgctgcgtcgtgcgatgggtaagaaaaagccggaggagatggccaaacagcgttccgtttttgaagagggcgcgaaaaagaacggtatcgacggcgaactggcgatgaaaatctttgacctggtggagaaattcgccggttacgggtttaacaaatcgcactccgccgcttatgcgctggtttcttaccagacgctatggctaaaggcgcactatccggctgaatttatggcggcggtaatgaccgccgatatggataacaccgagaaggtcgtcggcctggtggacgagtgctggcggatgggactgaaaattctgccgccggatattaactccggattgtaccatttccacgttaacgatgagggcgagatcgtctacggcatcggcgcgatcaaaggcgtcggcgaagggccgatcgaagcgatcatcgacgcgcgtaatcagggcggctatttccgcgagctgtttgatctgtgcgcgcggaccgacaccaaaaagctcaaccgccgggtgctggaaaagctgatcatgtccggggcgttcgaccgcctggggccgcaccgcgccgcgctgatgaactcattgggcgatgcgctgaaagccgccgaccagcacgccaaagcggaagctatcggtcaggcggatatgttcggcgtactggcggaagagccggagcaaatcgaacaatcctatgccagctgccagccgtggccggagcaggtggtgttagatggggaacgtgaaacgttggggctgtacctgacgggccaccctatcaatcagtatttaaaagaaattgagcgctatgtcggcggggtaaggctcaaagacatgcatccgacagaacgtggtaaagtcaccacggctgcggggctcgtgattgccgcaagggttatggtcaccaagcgcggcaatcgtatcggcatctgtacgctggatgaccgttccgggcgtctggaagtgatgttatttaccgacgcgctggataaataccagcagttgctggaaaaagaccgcatacttatcgtcagcggacaggtcagctttgatgacttcagcggggggcttaaaatgaccgcccgcgaagtgatggatattgacgaaactcgcgaaaaatacgctcgcgggcttgctatctcgctgacggacaggcaaattgatgaccagcttttaaaccgactccgtcagtctctggaaccccaccgctcggggaccattccagtacatctctactatcagagggcggatgcgcgagcgcggctgcgttttggcgcaacgtggcgtgtctctccgagcgatcgtttacttaacgatctgcgtggcctcattggttcggagcaggtggaactggagtttgactaatacaggaatactatgagtctgaatttccttgattttgaacagccgatagcagagctggaagcgaaaatcgattctctgactgcggtaagccgccaggatgagaaactggatattaatatcgatgaagaagtccatcgcctgcgcgaaaaaagcgtagaactgacgcgcaaaatcttcgccgatctcggcgcatggcaggtagcccaactggcgcgccatccgcagcgtccgtacaccctggattatgtccgtctggcgtttgatgagtttgatgagctggcgggcgatcgcgcctatgctgatgacaaagccatcgtcggcggtatcgcgcgtctggaagggcgaccggtgatgatcattggtcatcagaaaggtcgtgaaaccaaagaaaaaattcgtcgtaactttggcatgccagcgccggaaggctaccgcaaagcgctgcgcctgatggaaatggctgaacgcttcaacatgccgattatcaccttcatcgacaccccgggcgcttaccctggcgtgggcgcggaagagcgtggtcagtctgaagctatcgcccgcaacctgcgtgagatgtctcgtctgaacgtaccggtcatctgcaccgtgattggcgaaggcggctccggcggcgcattggcgattggcgtgggtgataaagtgaatatgctgcaatacagcacctattccgttatctccccggaaggttgcgcctctattttgtggaagagcgccgacaaagcgccattggctgctgaagcgatgggcatcatcgcgccgcgtctgaaagagctgaagctcatcgattccatcattccggagccgctgggcggcgcgcaccgtaatccggaagcgatggcggcgtcgctaaaagcgcagctgctggaagatttagccgatctcgatgtgttaagcaccgatgatttaaaaaaccgtcgttaccagcgtttgatgagctacggttacgcctaatcatttacctcatttttcccaggaggccggataatccggcctcttttttttggacgaggaaaaatgagacgccgatgagttgatgtgattaaacgcaacggcatgttctccctgacactgtagcaactgccaggcgtgtggccagggcaggcagtgaactacccttcaaggagaaaattatgggattgcaaaaaacactggcgctcagcgccgtggcggcaggaatcatgttgagcttatccggtgcgcaggccgcgccgctgcttagcagtagtgagccaatgaccatcaacgccagcgatctggcggcgaaagagaaagcgctgacggattttccgttaatggaggcagtgaaatcctctatccagacgttggataacagcgcggtcgaacaaatcgaaccggggcgcgccgctaacccggcaaacgtaaaacgcgttgaaagtattctgaaagaggccgactgggattatctgttcccgatgcgcgcgccggaatacacttattctaacttcctgaaagcgataggtaaattcccggcggtttgtggtacctacaccgatggacgcgatagcgacgctatctgccgtaaaaccctggctactatgtttgcgcattttgcccaggagacgggcggtcacgaaagctggcgtgacattccggaatggcgccaggcgctggtctatctgcgcgaagtcggctggacagaagggcagaaaggcggctacaacggcgaatgtaacccggatgtatggcagggccagacctggccgtgcggtaaagataaggacggcgatttcctcagctattttggtcgcggggcaaaacagctttcttataactacaactatgggcctttctctgacgcgatgtatggcgacgttcgccctctgctggataaacccgagctggtggcggatacctggatgaacctggcgagcgccgtcttcttctttgtgtatccgcagccgccgaagccgtctatgctacatgtgattgacggtacctggcagccaaacgatcgcgataaagcaaacggcctggtatcaggtttcggcgtcactattcagatcatcaatggcggcgtggagtgcggcggcgcagatgagaatgcgcagtcgcttaaccgcatcgcctactacaaagagtttgccaactacctgaaagtgccggtgccggcggacgaagtgttgggctgtaaaaagatgaagcagttcgatgaaggcggcgctggcgcgttaccgatctattgggaacaagactggggctggagcgccgatactgcggacggtaaaacctattcctgccagttagtgggatatcagacgccgtataccgcctttaaagagggcgactacacgaaatgtgtacagcattatttcaacgttaatgtcgtcgatgataacggaaccactgaaccggatgtcacgccaactccggcgccagtgacggatgaaaacgtggcgccagtcgcgcgcattgccgggccggtcggggcggtggaagctggtagcccggtttcactcagcgcggaaggatcgaccgacgcgaatggcgacaagctcacctatacctggatgtcgcaggatggcaaaacgctgagcggccaggataaagccgttgtgattttcaacgcgccggatgtcactcagaacacccagtatgtggtgaatctgaccgttagcgacggtacgctctccagtacagcggtttatacgctgaatgtgaaagcgaaggccgccgctgcggatgacgaagataagaccaccagctatcctgcctggagcagcagccagaaatggaatccgggcgacatcgttaacagtaatggcgcattgtaccagtgcaaaccgttcccggaaggctcatggtgtaatgttgcgcctgcctactatgagcccggtgtagggattgcctgggccgatgcatggaacgcattgtaataagataaatcctgtcggtgctttgcatcggcaggattgttactatgcttatctcaggttttttcaggagaaagcatgaacatcatcgccattatggggccgcacggggtttactataaagatgaacccatcaaggagcttgagcgtgcattacaatccctgggatttcaaattatctggccgcaaaatagcgttgacttgttgaagtttattgaacataacccgcgcatctgcggcgttatttttgactgggatgaatacagtctcgacctttgtagcgaaatcaaccagctaaatgaataccttcctctctacgcctttatcaataccaactccacgctggacgttagcgttcacgatatgcgcatggcgctgtggttttttgagtatgcattggggctggctgaagatatcgcgacgcgcattcatcaatatacaaacgaatatctcgataatattacgccgccgtttaccaaagcgctttttacctacgccaaagaaggaaaatataccttttgtacgccgggtcatatggcgggaacggcgtatcagaaaagcccgccaggctgcctgttttatgacttttttggcggcaataccttaaaagctgatgtgtcgatttcggtgactgaactgggatcgctgctggatcacaccgggccgcatctggaagcggaagagtatatcgcccgtacttttggcgccgagcagagctatatggtgacgaacggtacgtcgacctcgaataaaattgtcggtatgtatgccgcgcctgcgggaagtacgctactcattgatcgtaattgtcataaatcgctggcgcatttgctgatgatgagcgatgtggtgcctctctggttgaagccgacgcgcaatgcgctcggtattctcggcggtattcctaagcgtgaatttacccgcgacagcattacgcgtaaggtggcggaaaccgcgcaggcgcaatggccggttcatgcggttatcaccaattctacttacgatggtctgttgtataacactaactggatcaagcagatgctggacgttccctcgatccattttgattccgcctgggtaccctatacccatttccatccgatctaccaggggaaaagcgggatgagcggcgatcgggtgcccggaaaagtgattttcgaaacgcaatccacccataaaatgctggcggctttttcgcaggcgtcgcttattcatatcaaaggggaatatgacgaagagacgtttaacgaagcgtttatgatgcacacttccacatcgccgagctatcccattgtcgcctctatcgagaccgcggcggcgatgctgcgcggcaatccagggaaaagattgattaatcgttcggtggaacgggcgctccattttcgtaaagaagtacagcggttacgtgaagagtccgatagctggttctttgatatctggcagccggaagaggttgatgaggccgaatgctggccggtcacgccgggagaaacctggcatggcttcgccgatgctgatgacgatcatatgtttctcgatccggttaaggtgacaatcctgacgccggggatggatgagcagggcaacatgagcgaagaggggatacccgccgcgctggtggcgaagttcctcgatgagcgaggcgtggtggtggaaaaaaccgggccgtataatctgctgtttttgttcagcatagggattgataagacccgtgcgatggggctgctgcgcggactgacagaatttaaacgcgcctacgatcttaacctgcgcgtcaaaaatatgttgccggatctgtatgcggaagatccggatttttatcgcaatatgcgcattcaggatctggcgcaggggatccataaactgatccgccagcacgatcttccggggctgatgctgcgggcgttcgaggttttaccggagatgatcatgaccccgcaccaggcctggcagcgtcagatcaaaggcgaggtggaaaccgtggcgctcgatcaactgccagggcgcgtttccgcgaatatgatcctgccttatccgccaggcgttccgctgttgatgcccggcgagaggattacgcaacagagtcgggccgtgctcgattttctgctgatgctctgctcgattggccagcattatcccggttttgaaacggatattcacggcgcgaaacggaatgaagacggggtgtaccaggtacgagtcttaaaacacgcctgttagcttgcctgacgggaatgtgacgagtaacgtactgataatcaataaaggagacgctatgctgggattaaaacaggttcatcacatcgcgatcattgcgacagactatgcggtgagcaaggcgttttactgcgatattctggggttcgatctgttaagcgaagtttggcgggaagagcgtgactcgtggaagggcgatttggcgctaaacgggcagtatgtgattgagcttttctcttttcccttccctccggcgcgtccaagccgacctgaagcctgcggcctgcgccatctggctttcagcgtggaaaatgtggaaaacgccgttgcgcatctggaaaagcatcaggttaagtgcgaaccgatacgcatcgatccgtataccgggaagcgctttacttttttcaacgatccggacggtttaccgcttgagctgtatgagcagtaaggcttgtcattaagacgctcgccaggtaacgttgccgggctaagtcactataagcatggatcatgaccactctcacgttgaatacctcgttactctcttctcgccgtattctggctgcctttagcggtggcctggattctacggtgcttctgcatcaactggtgttgtggctagaacgccaccctgacgttacgctgcgtgctatccatattcatcacggtttaagccctcatgctgaaagctgggtgcggcattgcgaaaccgtatgcgcacgctggcaggttccgctggtagtggagcgggtgacgctggcggataatggcctgggtatcgaggcccatgcgcgtgaagcgcgctaccgggcgttcgcacagacgctattgcctggcgaagtgctggcaaccgcgcagcaccttgacgatcagtgtgaaacattcctgctggcgttaaagcgcggcagcggtccggccggactttccgcgatgggagaacgctcgccttttgccggaactctgcttcttcgcccgctgttgagagaaacgcggaagacgctggaacagtgggctgtgcgtcatggcttatgctggattgaagatgaaagcaatcaggatgacgcctacgatcgcaattttttacgcctgcgcgcgcttccgctcttacagcagcgctggccgcattttcctgcggcggtagcccgtagtgcgacgctctgcgccgagcaagaaaggctgctggacgagcttctggccagcgatcttacggactgtatcacgacggagggaacattgcggctctctccattaatgtcgatgagcgatgtgcggcgggcggcgattttgcgtcgctggctggcgatgcgtaatgcgccgatgccctctcgcgacgcgctggaacgtatctggcaggaggtggcgctggcgcgcgacgatgcctctccctgtttacgctttggcgatcacgagattcgccgttatcagtcgcaactgtggtggattaaatccgtggccggacaacacgaaacgacggtcgcctggcccgtctggcaaacaccgctggcgctgcctgccggcttagggacggtacagctcgttcctggcggcgaactgcgccgaccgcgagaggaagaatccgtcagcattcggtttaaagcgccagggttgctacacattgtgggacgtcacggcggacgtaaattaaagaaaatctggcaggagcaggggatcccgccctggcgacgagacaccacgccgctgttgttttacggcgaaacgctgattgcggctgcgggtgtttttgtgacgcgtgagggagcagcagaagataaagaaggggtgagtctggtttggcatgcctgatggcgctgcgcttatcaggcctacgtatcgcatggaacgtaggccggataaggtgcttgcaccaccatccggcaacaaaatactcaggattcgctaactaccacggtaccaatttccgggtggctgaaactggcgattttatcgagacgaagctcacaagactcgccggaaacctcggcaagcagatattctacatttttacgtaagatcaaatcgttcgcttttgcctgcaaaacctcgccatcttttaacgttagcgtcagtattaaatgatgcatgcaggcaagctcaagactatcgtagtcatcgcaattaatgggttgatacgtttcattcattgacataatcgctcaccagtaagttcgcggcagcataagctgccttttccctgaccgactctgaaagggcgctatctgccgccacttcattaagcactttcaatacacaacccagcgcatccgggacataccctaagtctccgctggcgatttccgcataccgcttgcgtactaactcacaatatttttccacatgccctcctgtcagcattctgacttaaccgtggatgcaagtctaagcctacgaagttaaatcttgtttagcaaggtgactataccatactcatttgcgcaatatcagcgcctgacgcgagtagataaaagattcgttaacagccttttagcgcggttttcgctacaatgggcgcctgattcgaaaggagttttctcatggcgcttaaagcgacaatttataaagccgtcgtcaatgtggctgaccttgatcgcaaccggtttctggatgcggcattgacgctggcgcgtcacccttctgaaacgcaggagcgcatgatgctgcgcctgttggcatggataaaatatgctgatgaacggttgcagtttacacgcgggctcagcgcggaagatgagccggaggcctggctgcgcaacgatcatctgggcatcgatctttggatagagctggggctgccggatgagcgccgtattaagaaagcctgtactcaggcgagcgacgtcgcgctctttgcttataactcccgggcggcgcaaatctggtggcagcagcatcaaagcaagtgtgcgcagttcgctaacctgtccgtctggtatctggatgacgggcagctggcgcagctcagtgaatttgccgatcgtaccatgacgctacaggcgacgattcaggacggcgcaatctggctttctgatgctcggaataatctggaaatacagctaaccgcctggcaacagccctcatgattgccatctcccggacggtctccatagccgataatgagctggaaattacggccattcgcgcgcagggcgcgggtggtcagcacgtaaataagacctctagcgcgattcatttgcgctttgacattcgggcctctggcctgccagagtattataaacagcgtttgctgacggccagccaccatctgataagcgatgatggcgtcattatcattaaggcgcaggagttccggagccaggagctcaaccgggaagcggctatcgccaggctggttgccgtcataaaagaattaaccgcggagcagaaaagccgtcgcgcaacccgtccgacgcgtgcctcgaaagagcgccgcttatcctcaaaggcgcaaaaatcttctgtaaaggcgcttcgcggcaaagttcgtcgtccactggattgacgggcaggaatagcaatttcataaggattttatggtgagaacagcaatattgtcagtagcggcagcctgtacgctatttgcattgatagggtgtaataaccgtgcggaagttgacgccctgcaacctgcgcaggcggcggaattaaaacccatgcagcaaagctggcgcggcgtgctgccctgtgcggattgtgaaggtattgaaacgtcactgtttctggaaaaagacggcacatgggtgatgaacgagcgctatcagggcgtgcgcgaagaaccttcctcttttgcgtcatacggtacctgggcgcggacggcggataaactggtgttaaccgacagcaatggcgagaaatcgtattatcgcgcgaaaggcaatgagctggagatgctcgacagagaaggcaatccggtggcttcgcagcttaattatacgcttgtgcctgttaccgccagcctgccggtaacgccaatgccgctgcgtggtatgtatgtatacagggccgatgcggcgacctttaccgattgcgcgaccggaaaacggctgccggtcgccagtaacgcccagcttgagcgcggctatctggcggcgaaaggtgaagcggaaaaaccggtgctgctgacggtagaagggcattttgtgttagccgcgaatccggacacgggcgagccggtaaaaacgctaatagctgataaaaatgtgaagtttgcgccgggtaaagattgcactcactaataaaaggcctcgcagggtgcgaggcctttacatatctgccggatggcgccgggcaatcccaacaaaatgtcgtttagcctttaatcgccttgaccagataatcaacgatatcgccggttttaatcagcgatttttcaccgctacgacggtatttatactcaatatcgtcgttatccaggttgcgatcgccaatcacgatagtatgtggaataccaatcagctccatatcggcaaacatcacgcccgggcgctctttacggtcgtccatcagcacttcaatgccctgcgcgcgcaattcgctgtacagcttttccgccagctcctgcacacggaaggatttgtgcatattcatcggcagaatagcgacctggaaaggcgcaatggcgtcaggccatacaatgccgcgctcgtcaaagttctgctcgatagccgcggcaacgacacgtgttacgccgataccgtagcagcccattgtcaggatctggttacggccatcttcaccctgaacggaggctttcagcgcttctgagtacttggtacctaactggaagatgtgacccacttcgataccgcgtttgataagcaacgttccctgaccatccggactcggatcgccggcgactacgttacggatgtcggcaacaacaggcgtcgccacatcgcgatcccagttaataccaaagtagtgtttaccgtcgatgttggcgccagcggcaaaatcgctcatggcggcaacggtacgatcgatgatgaccggaatcggcatattgaccgggccgagggagccagggccggcattaattacggcgcgaatctcttcttcggtagcgaaggtcagcgggctggcaacgtgcggcagtttttccgctttaacttcattcagttcatgatcgccgcgaaccagcagagccaccagcggagacttgctgtctttcaccgctttcaccagcagcgtttttaccgttttttcaattggcaggttgaattgttccaccagctccgcgatggttttggcatttggtgtatcgaccagagtcatttcctgcgtcgccgctgcgcgcggcgtttgcggcgcgatagcttctgccagttcaatgttagccgcgtaatcagaaacatcagagaaaacgatatcgtcttcgccgctttgcgccagcacctggaattcatgcgaggcgttgccgccgatagaaccggtatcggcctgtaccgcgcggaaatccagccccatacggctgaagatacggctatacgcggcgtacatggcgtcataggtttcctgcaacgactcctgagaggtgtggaaagagtaagcatctttcatcaggaattcgcgcgaacgcatcacgccaaagcgcggacgcacttcatcacggaatttggtctggatttggaagaagttcagcggcaactgcttataagagctgagttcattacgcaccagatcggtgataacttcttcgtgggtcgggccgagtacgaacggacgctcgccacggtcgacaaaacgcagcagttccggaccgtactgttcccaacgaccactctcttgccacaggtcggctggctgaacgactggcatcgacacctcgatagcaccggcgttgttcatctcttcacgcacgatgttttcgacttttttcaggacgcgcaggccggtcggcagccaggtatataacccggaggcgagcttgcggatcatcccggcgcgcagcatcagctggtggctgataacctcggcgtcggcaggtgtctccttcagagtggagagcaggtattggctagtacgcatgttgttacggttccagttgaacgatcgaacaggctcaatgtgagcctgatacaaaaaaagtgatttagtttaccagcgtgcaagagatgtcaaaagagaagggcgtgaaattaccgtggttccagcgcaaacacttcaaatccggtgttaaccacacgccagcgcacgttaaaatcatgcagccagacggcataggttttgcccgtctcttcacccttacgataagccgggcgaggatcttgcgccagcacatcgcaaataaatgtccgtagctgcggataacgcctttccagcgtcgtaagctgttgagccacctcagcggtaaaactcacgggcatttcagctatcggcgcctgttgcgcatagctggcggcggcgtccggtaaggcctcggcaaacggtaaatacggtttaatatccaccaccggcgtgccatccaccagatccagactgcctaatttcagaattacgctctctttccggcactcgataccttttagcgcaacgagcgacatgccaatcggattggggcggaacgtggagcgcgtggcaaaaacgcccattctggcgttaccgccaagacggggcggacgaactgtcggccgccagccgccgtccatcgtctgatgaaaaacgaaaagcacccacaaatggctgaaagcttccaggccgcgaacggcatcggcctggttgtaaggcgctatcagatgcagttcgccgcaggcgcttttgaccagaccaggctggcgcggaacggcgaatttttctttatagggggagcgaataacgccgatttgttcaaactgaaagctgctcatttcgccgaaatattcagggcggacccgatacaaaccgcctgacgatagcagcctggcgtgccgctggtaatttcacagctgtgcagcaggacggcgttggctttcattttagatgcattaatctgcatacgcttgcgcgcagttggaatgttaggcggagagtcttgatttgtcgcctggcaggattcgccgctaacctcgccaagatcgcggaaaggtttaccgactaagtcttcagcattggtgtaaatcctgacgggagcggcacgcggcgctttaggtttctccggctccgcttttggcggggttgcggtgctttgaacgggttcaacaggggatctgcttagcatggaacaaccgcccagcatgagtgccaataaacagatcggtaaagcacgcataatatttcctcaatgaatgttctaattgccagatattgaatcaggagcttgcataaatgacaagacgggcaatagcccgtcctgaataatattacagattgtggaatcagcctaaaacttaccagcctttcaccgcaccgccattaaaaactttatttgcggcttcgtacacttcatcagactgataagcctgaacgaattttttcacattctcggcgtctttgttatcttcacgcgtcacgataaggttaacgtacggagaatctttatcttcaacgaagataccgtctttcgctggcgtcaggccaatctggctggcgtatgtcgtattgatgactgctaacgcgatctgcgcgtcatccagcgaacgcggcaactgcggcgcttccagctcaacaattttcagatttttcgggttttcgacgatatccagcgaggtaggaagcagaccgacgccgtctttcagtttaatcagccctactttttgcagcagcaacagggaacgaccaaggttggtcgggtcgttaggcacagcgacctgggaaccgtccttgagctcatccagagatttgatttttttggaatatcctgcaatgggatagacaaaagtcttaccaacggaaaccagtttgtagcctcgatctttgatttgctgatccagatacggtttgtgctggaaggcattggcatcgatgtcgcctttgctcagcgcttcattaggcagaacataatcattaaaggtcaccaattccacgtccaggccgtatttttctttcgcgactttctgcgcgacttcggcaacttgctgctctgcgccaacgattacgccgactttaatatgatttggatctttttcatcctgaccgcaacccgcaagtgccagagaaccaatcagagcacccactgccgcaaaggttttgaatttgaacgccatgcttatttccttaatgagtatttgtgttgtgtttaacgttacttatgcgtgacagccctgacgatgcgatcgccggataactgaattaaataaaccagaacgacaagtaataccagcaccgtattcatcacggtagcattgtatccaatataaccgtactgatagccgatttgaccgaggccgccagcgccgacggcaccgcccattgcggagtaaccgaccagggtgatcagtgtaatggttgccgcattcaccagaccaggcagcgcttccggtaaaaggattttacgtacaatttgcagcggcgtggcgcccatcgctcgcgaggcttcaatcagcccggcagggatctctaacaacgcattttccaccatacgggcgataaaaggcgcggcgccgacggtcagcggtacaattgcagcctgcaaaccaatggaggtgccgacaattattcgggtaaaaggaatcatccacaccagcaggatgataaagggaatcgagcggaaaatattgaccaccgcggagagggagcgatacagtctggcgttctccataatctgccccgggcgcgtaacatacagcaatacgccaaccggcaggccaatcacgaaaccgaagaaaccggagacaaaggtcatcgccagcgtttcccagacgccacgaaccagtaaccacatcattgcctcagacataacccagtacctctactttcacatggtgatcctgcagccaggcaattgcggcttgcgtctcttcttgtgtgccgtgcatttccgttagcataatgccgaacttcacaccgcccgcgtaatccatctgcgcgctgataatattattgttcacattgaaacgacgcgcggtttcagaaagcagcggggcatccacagactgcccggtgaactccatgcgcagcatcggcacgctgtcagtttccggcgacgctttcaaacgcgcctggtaatcttccggaatgtccaggtgcagagtggactgaataaacttctgcgccagcggcgttttagggtgcgagaagacttcgctgaccgtatcttgctcaataagctcgccattactgataacggcaacgcagtcgcagatacgttttacgacatccatttcatgagtgataagcagaatcgtcaaccccagacgacggttgatatctttcagcaattccagaatcgaacgggtcgtcgcgggatcaagcgcgctggtggcttcatcgcacagcaacacttttggattactggctaacgcgcgggcaatcgcgacacgctgtttctgaccgccggaaagatttgccggatagctgtcgtgcttgtcgccaagaccgactaaatccagcagctctgtgacacggcgtttgatctcttcctttggtgtgttatccagttccagcggcaacgcgacgttgccaaacacggtacgggaagagagcaggttaaaatgttggaaaatcatgccgatttgacggcgagctttggtcaactcagactctgaaagcgttgtcagctcctgaccgccgacctgaacgctaccttcggttggacgttcaagtaagttaacgcagcggataagcgtacttttaccggcgccggaggcgccaatgacgccataaatctgcccggcaggaacgtgcaggctgacattatttagcgcctgaatggtgcgcgtcccctgctggaacactttggtaatattcgaaagtttaatcattgattctttattatcgtaatgaaatgagcggaggcattttcgtctgcctaatacggtcaacgccgtcaacagaatggatgttaaggcatccagacgtctaaatcaatcaggctttatacgatgagcactttcttgcctgctgaaacatgcgatactagcgccacttgctttactcaggagctataaaaggtggcaaagtttgtacccgcaatttttctcgaccgtgacggcaccattaatatggatcacggctacgtacatgaaatcgatgcatttgagtttatagacggcgttattgacgcgatgcgcgagctaaaaaaaatgggctatgcgttggtggtggtgacgaaccagtccggaatcgcgcgcggcaaattcactgaggcgcagtttgaaacgttaaccgaatggatggactggtcgttggcggatcgcgatgttgatttggacggcatctattattgtcctcaccatccgcagggcagcatagaagagttccgtcaggtatgtgattgccgcaagccgcatccaggaatgcttatctcggcgcgtgattttctgcatatcgatatggcggcttcttatatggtgggagacaagctggaagatatgcaggcggcagcggcggcaaatgtcgggacaaaagtgctggtgcgtacgggcaaaccggtcacggcagaagcagaaaacgcggcggactgggtgttaaacagccttgctgacctgccatcagcgataaaaaagcagcaaaaataagcgttatggataaaagatgagcggttaaaacaaaaatgcatttttccgcttgtcttcctgaaccgactccctataatgcgcctccatcgacacggcggatgtgaatcacttcacacaaacagccggtcggttgaagagaaaaatcctgaaattcagggttgactctgaaagaggaaagcgtaatatacgccacctcgcgacggtgagctgaaagccgcgccgcacctgctctttaacaatttatcagacaatctgtgtgggcactcgaagatacggattcttaacgtcctcggacgaaaaatgaataccaagtctcaagagtgaacacgtaattcattacgaagtttaattctttgagcatcaaacttttaaattgaagagtttgatcatggctcagattgaacgctggcggcaggcctaacacatgcaagtcgaacggtaacaggaagcagcttgctgctttgctgacgagtggcggacgggtgagtaatgtctgggaaactgcctgatggagggggataactactggaaacggtggctaataccgcataacgtcgcaagaccaaagagggggaccttcgggcctcttgccatcagatgtgcccagatgggattagcttgttggtgaggtaacggctcaccaaggcgacgatccctagctggtctgagaggatgaccagccacactggaactgagacacggtccagactcctacgggaggcagcagtggggaatattgcacaatgggcgcaagcctgatgcagccatgccgcgtgtatgaagaaggccttcgggttgtaaagtactttcagcggggaggaaggtgttgtggttaataaccgcagcaattgacgttacccgcagaagaagcaccggctaactccgtgccagcagccgcggtaatacggagggtgcaagcgttaatcggaattactgggcgtaaagcgcacgcaggcggtctgtcaagtcggatgtgaaatccccgggctcaacctgggaactgcattcgaaactggcaggcttgagtcttgtagaggggggtagaattccaggtgtagcggtgaaatgcgtagagatctggaggaataccggtggcgaaggcggccccctggacaaagactgacgctcaggtgcgaaagcgtggggagcaaacaggattagataccctggtagtccacgccgtaaacgatgtctacttggaggttgtgcccttgaggcgtggcttccggagctaacgcgttaagtagaccgcctggggagtacggccgcaaggttaaaactcaaatgaattgacgggggcccgcacaagcggtggagcatgtggtttaattcgatgcaacgcgaagaaccttacctggtcttgacatccacagaagaatccagagatggatttgtgccttcgggaactgtgagacaggtgctgcatggctgtcgtcagctcgtgttgtgaaatgttgggttaagtcccgcaacgagcgcaacccttatcctttgttgccagcggttaggccgggaactcaaaggagactgccagtgataaactggaggaaggtggggatgacgtcaagtcatcatggcccttacgaccagggctacacacgtgctacaatggcgcatacaaagagaagcgacctcgcgagagcaagcggacctcataaagtgcgtcgtagtccggattggagtctgcaactcgactccatgaagtcggaatcgctagtaatcgtggatcagaatgccacggtgaatacgttcccgggccttgtacacaccgcccgtcacaccatgggagtgggttgcaaaagaagtaggtagcttaaccttcgggagggcgcttaccactttgtgattcatgactggggtgaagtcgtaacaaggtaaccgtaggggaacctgcggttggatcacctccttaccttaaagaactgttctttgaagtgctcacacagattgtctgatgaaaaacgagcagtaaaacctctacaggcttgtagctcaggtggttagagcgcacccctgataagggtgaggtcggtggttcaagtccactcaggcctaccaaattttccctgaatactgcgttgtgaaataactcacatactgatgtatgcttcgttattccacgccttgtctcaggaaaaattatcggtaaagaggttctgactacacgatggggctatagctcagctgggagagcgcctgctttgcacgcaggaggtctgcggttcgatcccgcatagctccaccatctcgtgagtgtttacgaaaaaatacttcagagtgtacctgaaagggttcactgcgaagttttgctctttaaaaatctggatcaagctgaaaattgaaacacagaacaacgaaagttgttcgtgagtctctcaaattttcgcaacacgatgatgaatcgaaagaaacatcttcgggttgtgaggttaagcgactaagcgtacacggtggatgccctggcagtcagaggcgatgaagggcgtgctaatctgcgataagcgccggtaaggtgatatgaaccgttataaccggcgatacccgaatggggaaacccagtgtgactcgtcacactatcattaactgaatccataggttaatgaggcgaaccgggggaactgaaacatctaagtaccccgaggaaaagaaatcaaccgagattcccccagtagcggcgagcgaacggggaggagcccagagcctgaatcagcatgtgtgttagtggaagcgtctggaaaggcgcgcgatacagggtgacagccccgtacacaaaagcgcatgtgctgtgagctcgatgagtagggcgggacacgtggtatcctgtctgaatatggggggaccatcctccaaggctaaatactcctgactgaccgatagtgaaccagtaccgtgagggaaaggcgaaaagaaccccggcgaggggagtgaaaaagaacctgaaaccgtgtacgtacaagcagtgggagccccaccaccaaagcatttgctgtaccgcgttgacggagcgaagcgacgtcaaaccgataaaacagcagtgtaaagtgagccgcagggcgctttgcgcgacagcgcaaaggcaggcggtttcgcgtagcgaaagcgaatgctttggggtggggtgactgcgtaccttttgtataatgggtcagcgacttatattctgtagcaaggttaaccgaataggggagccggagggaaaccgagtcttaattgggcgttaagttgcagggtatagacccgaaacccggtgatctagccatgggcaggttgaaggttgggtaacactaactggaggaccgaaccgactaatgttgaaaaattagcggatgacctgtggctgggggtgaaaggccaatcaaaccgggagatagctggttctccccgaaagctatttaggtagcgcctcgtgaattcatctccgggggtagagcactgtttcggctagggggccatcccggcttaccaacccgatgcaaactgcgaataccggagaatgttatcacgggagacacacggcgggtgctaacgtccgtcgtgaagagggaaacaacccagaccgccagctaaggtcccaaagtcatggttaagtgggaaacgatgtgggaaggcccagacagccaggatgttggcttagaagcagccatcatttaaagaaagcgtaatagctcactggtcgagtcggcctgcgcggaagatgtaacggggctaaaccatgcaccgaagctgcggcagcgacactgtgtgttgttgggtaggggagcgttctgtaagcctgtgaaggtgtgtcgtgaggcatgctggaggtatcagaagtgcgaatgctgacataagtaacgataaagcgggtgaaaagcccgctcgccggaagaccaagggttcctgtccaacgttaatcggggcagggtgagtcgacccctaaggcgaggccgaaaggcgtagtcgatgggaaacgggttaatattcccgtacttggtgttactgcgaaggggggacggagaaggctatgttggccgggcgacggttgtcccggtttaagcgtgtaggtgtgtgttccaggtaaatccggttcactttaacactgaggcgtgacgacgaggcactacggtgctgaagcaacaaatgccctgcttccaggaaaagcctctaagcatcaggtaacatcaaatcgtaccccaaaccgacacaggtggtcaggtagagaataccaaggcgcttgagagaactcgggtgaaggaactaggcaaaatggtgccgtaacttcgggagaaggcacgctgacacgtaggtgaagtgatttactcatggagctgaagtcagtcgaagataccagctggctgcaactgtttattaaaaacacagcactgtgcaaacacgaaagtggacgtatacggtgtgacgcctgcccggtgccggaaggttaattgatggggtcagcgcaagcgaagctcctgatcgaagccccggtaaacggcggccgtaactataacggtcctaaggtagcgaaattccttgtcgggtaagttccgacctgcacgaatggcgtaatgatggccaggctgtctccacccgagactcagtgaaattgaactcgctgtgaagatgcagtgtacccgcggcaagacggaaagaccccgtgaacctttactatagcttgacactgaacattgagccttgatgtgtaggataggtgggaggctttgaagtgtggacgccagtctgcatggagccgaccttgaaataccaccctttaatgtttgatgttctaacgtggacccgttacccgggttgcggacagtgtctggtgggtagtttgactggggcggtctcctcctaaagagtaacggaggagcacgaaggttggctaatcctggtcggacatcaggaggttagtgcaatggcataagccagcttgactgcgagcgtgacggcgcgagcaggtgcgaaagcaggtcatagtgatccggtggttctgaatggaagggccatcgctcaacggataaaaggtactccggggataacaggctgataccgcccaagagttcatatcgacggcggtgtttggcacctcgatgtcggctcatcacatcctggggctgaagtaggtcccaagggtatggctgttcgccatttaaagtggtacgcgagctgggtttagaacgtcgtgagacagttcggtccctatctgccgtgggcgctggagaactgaggggggctgctcctagtacgagaggaccggagtggacgcatcactggtgttcgggttgtcatgccaatggcactgcccggtagctaaatgcggaagagataagtgctgaaagcatctaagcacgaaacttgccccgagatgagttctccctgagacttagagtctcctgaaggaacgttgaagacgacgacgttgataggccgggtgtgtaagcgcagcgatgcgttgagctaaccggtactaatgaaccgtgaggcttaaccttacaacgccgaagatgttttggcggatgagaagacgattttcagcagtgattcagagttgagtacgcaatactttgcgcagcagcaaggcggcaagcgaaggaaaggaaggagcatacagaagtatgtgactgagtttacgagcgcaggcaacgccgctgatgcgataaagaattgcgtacagagcacaaagaatttgcctggcggcactagcgcggtggtcccacctgaccccatgccgaactcagaagtgaaacgccgtagcgccgatggtagtgtggggtctccccatgcgagagtagggaactgccaggcatcaaattagaagtatggcattaactttcggggcagttcactactcgacagagagtaggacaaaagcgaaagcttttgaacgttgcgaagcaacggcccgaagggtgaatcacgaagtgattcataaactgccaggcatcaaattgcagtaaaccgggatgaaaatccgggttgtgacaaagaaattcggtggagcggtagttcagttggttagaatacctgcctgtcacgcagggggtcgcgggttcgagtcccgtccgttccgccacttattaagagccctgagcattagctcagggctttttctttgcatatcatttaattattgctcaattcgcaaaaatcctctgcatttctcgctctttttctacaaagcgctgaaggtcataatcccctcagttaacgaacatagtgattaaaaagaggaattctatgactatccctgcattcggtttaggtacttttcgcctgaaagacgacgtggttatcgcttctgtgaaaacggcgcttgaactgggctaccgtgctgtcgacactgcgcaaatctatgataatgaagcggctgttggacaggcgattgctgagagcggcgtaccgcgtaatgagctgtacatcaccaccaagatctggattgaaaaccttagcaaagacaagctaatcccaagcctgaaagagagcctgaaaaaactgcgtaccgattatgtcgatctgacgctgatccactggccatctccgggtgatgccgtgtctgtcgaagaatttatgcaggcattgctggaagctaaaaaacaagggctgactcgcgaaattggcatttcaaacttcaccattccgttgatggaaaaggctattgccgcggtgggcgcagaccatatagccaccaaccagattgagctatctccgtatctgcagaatcgtaaggtggttgactgggcgaaagcgcacggtatccacatcacctcttacatgacgctggcatacggtaaagcgctgaaagatgaagtgattgcgcgcattgcggctaaacataatgcgaccccggcgcaggttattctggcatgggcaatgggtgaaggttactccgtgatcccttcatccaccaggcgtgaaaatctggcaagcaacctgctggcgcaggatctgcatctggatgccgaagataaaaatgcgatcgcggcactggattgcaacgatcgtctggttagcccggaaggactggctcctgcctgggattaattacccgatcctttgtacctttacccctctttcacagctcctgcgggagctgttcttatatattcgctcaaaaagtcgataaatgcccgaatacgtgtgctgacggcgcgatcgctgtagtaaacggcgctgaaaggcatttctaccggcagacgtttatcggccagcagttccaccagttctccccgggcgatctctttatcaatcatataatctgaaagacatgcaatgccgttaccgctcaggcaaagttgttttaacgtttccccgctgttggacgaaatcccacattcgatctcatggagctgtccgtcactacaggctatcggccaggtattgagcgagatgggttctgagaaccccaggcacagatgctgttttaactcttcaacgctctcaggcttgccaaaacgggcaatataatccggtgaggcgataatcttacgatagctggtaaataacggacgcgcgcgcagacttgaatctgtcaacgtgcctgcgcgtatcgcaacatccacttttcgttcaataagattgatgaacgtttctgaggagacaagagacaacgttatttccggataccgttcacgaaaaggtttaatcagcggcatcaggaaatgcagcattaccggcgttgccgcatcgatacgcagtaagccgcgcggggtattacgcgactccatgatttccgtttctgcggcggccatttcttgcagtatctgctgcacgcgcctgaagtatcgctctccttcttcagtcaggctcagctgtcgggtcgtacgattaagcagactgacgccgagcttcatctccagctttttaactgcccggctgacagcggaattggcctgtccaagctgctctgccgcccggctgaagctgccgctttccacgacagcgacaaaaattgcgagttcttcggaggtggctttcatttttgctcctgaagcaaaattaaattgatattttggctatttttgtcattaaaacatccaggcatactgcgtgtcatctgattactgctgttatggagttatgtatgcctctcgctttatttgcactgacaataagtgctttcgctatcggtacgactgagtttgtgattgtcggcctggtgccgaccattgctcaacaactggctatctcgttaccttccgccggaatgctggtttcaatctatgcgctgggtgtggctattggcgcgccggtgctaaccgcgctgaccggacgcctgccgcgtaaacagttactggtcgcgctgatggtcttgtttacggcggggaatttgctggcatggcaggcaccgggctatatgacattaatcgccgcccgtctgctgacgggcctggcgcacggcgtgttcttctcgattggctctaccatcgcgacaagtctggtgccaaaagagaaagcggcttctgctatcgctattatgtttggtggtttaacggtagctctggtcacgggcgtgccgctgggcacatttatcggtcagcattttggctggcgtgagaccttccttgcggtatcactgttaggcgtgattgcgctgatgagcagtcaactgctgatccctgccaatattcccggtcgggcggccgccagcattcgtgaccaggtgaaagtactgactcatcctcgtctgttgctgatttacgccgttacggcgctgggctacggcggggtattcacggcattcaccttcctggcgccgatgatgcaggatctggcgggattctccccggcagcagtaagctggatcctactgggttatggcgtatctgtggctatcggcaatatctggggcggtaaactggcagataagcatggtgccgttcctgcgctgaaattcattttcgccgcgctgtttgttctgctgatggtcttccaggtgacggcctccacgcagtatgccgcgctggctaccattctggtgatgggggtctttgccttcggtaacgtaccgggtttgcaggtctacgtggtacagaaagcggaacaattcacgcctaatgcggtagatgtggcgtcaggtctgaacattgcggcgtttaacattggtattgcgctgggctccgtgattggcgggcaaacggtggcgcattacggtttggcgcagacgccgtggattggcgccctcattgttctggtggctttcctgctgatgggggtcagcggacgtcttgataaaactgtacgcattgctttggagtaaattattgatgtaagcgcctacttacaaaacaaactgcaattgttcgttgaaagtgagtgctaaaatccctataacagaagaaccagtccggttgaggactggttgacgttacagaggtttgaaagtcaaaagtgcgaaaaaacacctatgcgatgcgctatgttgccggacagcccgccgagcggattttgccgccagggtcgtttgcgagcattggccaggcattgcccgccggggaaccgctaagcagtgaagagcggatccgtatcctcgtgtggaatatattcaagcagcagcgagccgaatggttatcggtgctgaagaactacggcaaagatgcgcatctggtcctgttgcaggaggcgcagacgacgcctgagctggtacagtttgccaccgctaactatcttgccgccgaccaggttcccgcttttgtattacctcagcatccgtctggcgtcatgacgctgtctgccgcccatcctgtttactgctgccctttacgggaaagagaaccaattttacgtttggcgaaatcagccctggtgacggtatatcccttgccggatacccgtttattaatggtagtaaatgttcatgcggtaaattttagtctgggcgtggacgtatacagtaagcagttacttccgatcggcgaccagattgcgcaccatagcggccctgtcattatggcgggggattttaatgcctggagccgcccacgtatgaatgcgttgtaccgctttgcacgtgagatgtcgctgcgccaggtgcgtttcactgacgatcagcgccgtcgtgcgtttggacgaccgctggattttgttttttatcgtgggttaaacgtgaatgaagcctccgtactggtgacgcgcgcttccgatcacaatccgctactcgttgaattcagtcccggcaaacctgagcaataaaggtgcgtcaggtctgccgtggggcaggcctcttcgggtgctgccctctatttttctcataacagaagggcactaccatgacaacgcattcccatcatgacaatgttgaaaagcagtttggttcacaggcgaacgcctatttacatagcgccgttcacgcatcgggtcgtgacttagcgcggctggcgcaaaggctgtctgatttttcccacgcgaacgtactggatatgggatgtggagctggacacgcgagttttgtcgctgcgcaacatgccaactcggtcgtggcatacgatttatccgccagcatgcttgaggttgtcgctggagcggcggaagaaagacatttaagtaatattactctccggcaaggctatgccgaaaaactgccctttgaagatgcatcgtttgaggtggtgattagccgctattccgcgcatcactggcacgacgttggtcaggcattgcgtgaggtttatcgtgtattaaaacccggcggcgtgctgattatcatggatgtcatgtcgcctggacatcctgtaagcgatatctggctgcaaacggtggaggcgttacgcgacacgtcgcatgtccgtaactattccagtggcgaatggctgacgatggtcaataacgcgatgctggtaacgaataccgtgataaccgatcgtttatcgctggagtttcgctcatgggtaacgcggatgcgtacgccagcgccgttggttgaggcgattcgattatatcaggcgagtgccccggtagaggtgaagcgttattttgagttgcaggatgacggctcgtttagcagcgatactatcatgctggaagcgcataaagcggtatagcaatttaaaaggcgccgggggaagcggcgccttttggctttttcgtcggacaatatcaggagtctggcgtgctattgtccttcacaaacaacgtaagctgatcgcccggttgtagattatccgtatcatggttccagcgcatcacatctttgatatttaccccgtgacgtctggcgatactggaaagcgaatcgcctttacggacacgatagataatgctatcgctattgtttgccagtcgttgtgcgctgctgccagcgcctacggtcaggctttgcccgattttcaggcgcgaaccacgcaggttgttccactgctgcaagtccttcgtgcttacgccaagccgcgaagcaataccggaaagcgtatcgccagagcgcaccttatagctacggctattcaacggcgtattgtcggcgatcagttgggactgaacggcgtcaatctcaccggaagccagcgactcacgcaactgctcggcatgctttttgggcaccataacatattgcggaccgcttacgcctaaggtagacccttttacaccggcattaaacgtcttcagcttgctgatagacatgcccgccatatccgcaacctgggccatttcaactggactgtttaaacgaactcgtgccagcgctcggctttcatctgttgttggcagacgtacgccgtagcgtttgctgtttttgagaatttcactcaatgccagcatcttaggtacgtagagttttgtttctctgggcaaagaaagcgaccagaaatccgtcggttttccacgcgctttgtttgctttaattgcccgcataacacggccttcgccgctgttatacgctgcaacggttaacagccagtcgccgtcaaacattttgttcagacgctgcatcatgtctaacgcggcggtcgtagaggctacaacatcgcgacgcgcgtcataattacgggtctgctttaaaccataattgcgccctgtgctcggtatgatctgccagatgcctgcggcattggcgccagacgttgcgtgaggatcaaaagcgctctccactatgggtagtagtaccagctccataggcatgttacgtttcttaacctgccccgctatccagtacatatacggctctgcccgtaaagttacatcgtggagatagctcttattgcgtaaatacttctgtttctgttcgcgaatccggctgttttccggaattcccatctttagctcgtcgccaatgaaagcccacaagtcctgatctggcgcgatagacgttccgtcgtccatccatcgtgcctgactcgtaaactttcctgcttccccttgaccagctgcagaaaggctctgtgcgtgctgttggacgttgccagtgttctgagacgtctggcaccccacaagcaggacagaggcgagtaatatcgcttttgccttcatgtgtgtgtcaatagttgcttaaaagacgaccgatcataacggcgaagttagcgaatgacaagtaagaattatcagaacgtgtctttctttgaccttaaccatgcaaaacgcgcttctggttgttgcaatattgtttctttgtttatttcattaattaaatcaatatcttcagttcttaaaaaaagattaatcttacgctcatttttaagaataacgggtagtgtcatttgtttttttacacgtaactctttaactttacgataatattcatttatgaacgaatcgtgcggaagtatgctcaatgcgaacttaatgttagctaaagtgtattcgtgagcgctgcaaatgagtgtgtcatcaggcagagagttaatcttcataagtgactgatacatctgtgatggcgtgccttcaaacagtcgaccacagccgccagagaacagcgtgtcgccgcagaataagtaaggatggctaaagtaacagacgtgtcctaacgtgtggcccggcgtggcaaaaagagtaaatttctcgcctaaaacgcgaatagtatcgccatcgccaacaagatgggttgctcccttgtcttgcgtttccgccggtccataaaccgtcatttgcgggaagtgttgcaacagctctttgactccgccaacatggtcgtgatggtgatgcgtcagaaaaatcgcctccggcatccacttatgttcagcaatggcctttaagacgggggccgcttcgccgggatcaacaatcacacagcggccttcatcattggtcagcacccagatgtaattgtcctgaaacgcgggaatactgttaagattcatatattacctctcaaataattagcggaaggttgcgatgaaaccggcaaggctctctcaaactgtcgttgcgcccggatgttggggtgagttgccctggggcaattactaccgtgaggcgctggaacagcagctaaatccgtggtttgcaaaaatgtatggtttccatttgcttaaaatcggtaatttaagcgcagaaatcaattccgaagcgtgcgcggtctcccatcaggtgaatgtttcgtcgcaggggtcgccgatgcaggttctggccgatccgctacaccttccttttgcggataaatccgtcgatgtttgtctgctggcgcatactttgccgtggtgtaccgacccgcaccgtttattgcgggaagccgaccgcgtattgattgatgacggttggctggtcatcagtggatttaacccgctgagtttgatggggttacgtaaactggtacccgttttacgtaaaacaccgccctataatagtcggatgtttacccttatgcggcaactggactggctgtctttactcaatttcgaagtgctacattatagccgttttcatgtcttaccctggaaaaagcagggggggcggcttttaaatacgcatatcccggcgctgggctgtttacagcttattgtggcccgtaagcggaccatcccgcttacgcttaatccgctgcgacataataaaagtaaaacccctatccgccagaccgttggcgccacccggcaatatcgcaaaccggatggctaagcttccgcctggtagccactatcttcctgcgtgggattcattgccgcggcgcgcgccagttcatcacaacgctcgttttcgggatggcctgcatggcctttgacccatacccatttgatctgatgctgacctaacgcagcatcgagacgtttccacagatcgacattttttacgggtttcttttccgctgttttccagccgcgtttcttccagttatgaatccattgggtaattccttgccgcacatattggctgtcggtgctcaatgtcacttcgcaatgttcttttaacgcttcaagcgcgacgatcgccgccatcagttccatacggttattggtggtcagcgtgtaaccttcactaaacgttttttcatgaccgcgatagcgtaagatagcgccataaccaccaggccctggattccccaggcaagagccatcggtgaaaatttctacctgtttaagcatctctggtagacttcctgtaattgaaatcgataacaaaacgcaagtctgacataaatgaccgatatgagcactgcaattacacgacagattgtcctcgataccgaaaccaccggtatgaaccagataggcgcgcactatgaaggtcacaagattattgagatcggtgcggttgaggtgataaaccgtcgtctgaccggcaacaattttcatgtttacctgaagcccgatcgccttgtcgatccagaggcttttggcgtacacggtattgccgatgagtttctgctggataagccggtttttgctgatgtggtcgatgagtttcttgattatatccgcggcgcggagctggtcatccataacgcatcgttcgatatcggctttatggattatgagtttggtctgcttaaacgcgatattcctaaaaccaatactttctgcaaagttaccgatagcctggcgttggcgcggaaaatgttccccggcaagcgtaacagccttgatgcgctgtgttcgcgttatgagatagataatagcaaacgtactttgcacggcgcattgctcgatgcccagatccttgccgaagtgtatctggcgatgacgggcggacaaacgtccatgacgtttgcgatggaaggagagacgcaacggcagcaaggtgaagcgaccattcagcgaatcgttcgccaggccagccggttacgggtcgtttttgcctctgaggaagagctggctgcgcatgaatcgcgacttgatctggtgcagaaaaagggcggaagttgcctttggcgggcgtaatttattcctttttaggctataaaaatcatccttcgggcgatttttgcagcaactgattcaaaaggtgagaaaaagcgttgacgggcgacaccgcaaaccgtaatattcgcctcgttcccagcgggaacatcacggagcggtagttcagttggttagaatacctgcctgtcacgcagggggtcgcgggttcgagtcccgtccgttccgccagatacaaatctcagggtgtttttatatatcctgtgaagtaaaaaaaaaccgtatcactgtaaaagggatacggttttttttcgtcttcaagaagttccaccgcctatcgtggaatctgacgcaaatgggcctacgcctggatgacgaacaggatattaccgccacttctttcactgtcatggctattttgatcccactgacatttaaggcgcggcctcatggcggtgcttaaccgggatcgggacatgttcagcgcagaagcagactgcgtaatgttgatatcactcagataattacggagaaccgccagacatgcgcatcatcactccagggcatcccacttctccagcaactccaccgggatctcattgatcacctccgagaaccgttttcccaccagtctttcagcctggcgtaacagtgggatggtcgggctactgggttcactgctctcaaaccagcgacgaatgcaccgcaggcgctccagcgcatcattacgatcgcgaattggccccggttcagcattgtgtgggagggatataccgggtggcgcgttgacaggcggcacatcctctgcccgtgccggaacggcattatccataaccgtgcctgcggggtctggcactggcgctggcgacggagggatttccggtgtggttgtctgtaccacgtcaggcagcagcgctaacaactgccgcaggcgtgaaaaatctggagccagatcgcctaatgtctcacgcgcccacacttgcaggcgttctgcgctttcctgcgcttcgcgaaacgccgccagcggtaatgccccacgggcttcgaggtcggccagttgctggcggacggattcgggggccagcgcatcagccgggcgaggggcggataacgcgcgctcgacatcccgtacctgcaggcgcaggacggcactgtttgacagcgtgataccgcgaatgtctgccatcacgccttcgtgatccagcagcgccgccagggcattactgcgcgccagcgccgcatcttcaatagattctgcgggtgcgccttcgccggtaagcagctgtggatggagtgcatcggaccagattacgctcagttctgccagttgcgtgagcatttccgccagtccctgtgcgccagcctgctggatgcgactgcgcagcagcaggatcaacacccggatatccttactgcgcgtgagcagacggcgcgtatcacgttcaatttccggccagttcacggcttccggcgtactgacaaaatcaccatattgcgcctccgcctggggggcggcgcggctgaacagcagcaggtattccgggtcgtactccggatcggggccgcagggttgttccgcgcttaccggtttagtcagggacatgtccatatcattactctcagttggttaagccgtgttcaggttcaaaaatcatgccggtcaccggacggtcatgcatggctttacctgcccaggccgtccagccaagccgctgcgcaccgccgatcaccgcaggcggtgcggcatgaggcttcaactgcagctcaatttcccagcaatattcaaaaccaatgaacgtacgcaccagttctgtcagcacgggcagattgttgccaccgggcagaaaacgcaggtaatcctccagcgtgagcgggccgataattagccggaatttgtactgcatatccggtacggcctggccgataagcgccccgttgcccagcaccgaagactgcgcgggcgtgcccagacgggtgatttcatcgttcgccaccgttatccagtgcagggcgaactctttcaccgcaaaaggtacgctgaaatagtgcgccagcgtggcggccagcccgtcaggattgcgcgattcgcgtaccagatgggcggaggctgccaggcgaacatgatctgacagcgggctttcggcgctttcccgtagatcctgcccgctgagactggcgatataaaacgcaaaacggtcgtgttccggtttgtccagcccgccaccagcggactgggcgctgcgccatgcctgccagaactgcgtcagccagcggtggtgaaaaatattggaaaaatgaaccagcgtcggatcgtgacgactctctgagcggtttagcgccagctcggtatagtgcagcggcaacgggccgtttggcccccatagtccgaggctgtatccatcccgttcatcgtcaggaaatggataaccttaccattctgaaaacaacggtcacactgaaaaaaagtaccggtgaatgtggctgtttctcaacattaatcaactataccagcttactggcgcaggatgttgagggttacgaacgcggaagtgcatattcccttcaggaggggaatatctcactggcgaagatgcagggacgttatcctttcagctttgtattatcggtggataaccagtctgtacgggatcagaagctggcgctaatgatacgttgtacaccaccgctgtaatacacagaatagtcagggagaagatgatggcagtaagactgacttttgacgggcaaaagctgacatggcctggtatcgggatatttaaggcgaccacggggttaccggatttacagtggccagataaacagtgtgtgccggatgcggcgataccggaagggaattataaattgtttattcagtttcagggggaggcaccgataagaaatgctgcggattgtgatctgggaccatcatggggctggagtaccattccgcgaggccaggctgccggaacatgtgagatatactgggcgaactggggatataaccgtatccggctggaatcagcggatgagaagacccgaaaagcctgtgggggcaagcggggtggtttttatatccatgattccaccaaaggttacagccatggttgtattgaagtggaaccggtgtttttccgtattctgaaacaggagacggaaaaagaaaatggtgaaaagacatttacggttaatgttaagtatgtttctggtcagcaaacgaatggtggaacaaaacaataataccgttaaaaccggatcaaattatcgtgtctgaacgtgctgtggttgacaatgattacaatggtggccagataagtaacgagcaccaatgataaagtatatgactggcggtgtgctggttattaatcaaatttttataaaatgcaatgcgaatctggtaagcgtaataaaaataaaatcataatattgttatattcatttccttatttatgtaattcagtatttatgttatgtgctaatttttgtgtttttattttcatggctcttgtcagcaatataccctgttcttctggtaaatatttaaatataacaggctggttgcattataaagtgcggggcactgtttcctgacggtgagtctatttattttaatccggtattaaaggagtcactaccatgagttttgtatccacaaataataaatccggtataggagggctgacgacaaccacgccgccgataaccggagaaagtggcggtgtcaccgcagattcagtcgccggaagcgtggcagatgcggcggaagccgccgtggaacaggctgcgggatcgctgtttggcgcattgccggagccatcaggactggtgaaagccgcggtggcagcggcgcaggccgccgccgcaggtatggcgcaggatgcggtatcggccatcgtctccgctgttgcaggcgggccgggggcgcataatgtgacggtcagcggcagcgccgtaccgccgggcgcattactgttcgccagcctggacggcggcgaaacattaagtgaactgttcagctatgtggtacagctaaaaacgcccgacaccctgaatctgggctatgtctccccggcggccaacctgccgctcaaaccgatggtgggcaaagatctgtgcgtcaacatcgaactggatggtggcggcacttcccgctggagtggcagcggacctacagcagccgtgatgaacggacggaggggatgttcgggcggggctggagcgtgctgtatgaagtgtgcctggagcgtacgccggacaacccggatgaaaactgcatgacgtatgtggccccgatgggacggcaaattgacctgcaggcggtggagccggggagtggtttttacagccccggcgaggggctggcagtgcggcgcagcgaacagggccactggcttatcagcagtgatgacggcgtgtacaggctgtttgaagcggacccgttcagcccacagcgtcggcggctgaaaatgctgggcgaccgcaacagtaactgccagcacctgacctacgacaaccacgggcgtctggtggaaatcagcggcgatcggcagcgcccctgcatccggctgcactatgagctggcagcgcacccgcagcgcgtgacgcgcatcttccgccattacccggaaggggagccggagctgctgcggcgttaccgctacgatgaggcggggcggctgaacggggtagtggacaacgcaggtcagtatcagcgcgagtttgcgtacgacgacaacgactgcatgacgatgcaccgggagccgggcggcgaacggtattactacacctgggcgtggtttgaaggcccggacgatgcggcgtggcgggtgacgggccatcatacggacagcggcgagcagtaccgtctggactggaatctggcagaacgttcgctgtgcgtgacggatagtctggggcgtacgcgctgccactggtgggatgcgcagggcctggtgacggcgtaccgggacgaggccgggcagatgaccactttccgctggagcgatgaagagcggttactgctggggatgacggacgcgcagggcggcaaatggcgttatgtctatgaccgtctcggccacctgacggagacgcatgacccgctgggccgggttgagcagacgcagtggcatccggtgtggcaccagccggaaacggaggtggatgccgcgggggcggcgtggcgttatgagtatgatgagcggggcaacctgcaggcggtcagcgacccgctgcaccagcgcacggtatacgggtacgaccggcacggtcaggtggtgcggataaccgacgcgcggggcggagataaatacctgcagtggaacgaagacgggcagcttatgcgccacacggactgttctggctcgcagacggcatggttttatgatgaacgcacgcggctggaaagggtgacggacgcggagagtaacagtacgcgttacagctatgacggcaacggacatctgacggaggtcatgttcgcggacgggcgtacggagcgttaccagccggatgcggcgggacggctggtgaaatacaccagcccggcggggcagataacacgctggcagcgggacggccaggggcgggtgcgcaggcagacggatgcgacgggtcgcaggacggcgtatgagtacgacgcttacgggcggctgaccacgctcacgaacgagaacggggaaagctaccggttccggtacgatgttctggaccgggtgacggaacagacggaccccggcggcagccgccgggcatacgggtataacgcgctgaatgcggtgacggcggtgatatacggcggggagcgcgggggagaaatccgtcacggtctggagcgtgatgcggcggggaggctgacggcgaaaatcacgccggagacgcgcacggaataccggtacgacgcggcggaccgtctgctggaaatccgccgcaggcggcatgatgcggcggaaggcggagagccggaagttatccggttcagctacgacagtgcgggtaacctgctgagcgaggagacggcgcagggcgtgctgcagaaccggtacgatgttcagggcaaccgcacagaaacgcagatgccggatgggcggacgctgcggtacctgtactacgggagcggccatctccagcaaatcaacctggggcgtgatgtcatcagcgagttcacgcgtgaccacctgcaccgtgaggtgcagcggagccaggggcggctggacacgcggcggatgtacgaccggacgggccggttaacgcggaaactgacctgtaaaggaatgcgcggtgtggtgccggagacgtttattgaccgggaatatgcgtacagcggccaggatgagctgctgaaaaagcggcacagccggcagggggtgacggattatttttacgacacgacggggcgtatcacggcgtgccggaatgaggcatacctggacagctggcagtacgacgcggcggcgaacctgctggacaggcggcagggagagaccgcgcaggcgggtgcaggcagcgtggtgccgttcaaccggataacgtcataccgtgggctgcattaccgttacgatgaatatggccgggtggtggaaaagcggggccgcaacggtacgcagcactatcgctgggatgcggagcaccggctgacggaagtggcggtcatccgggggagcaccgtacggcgttacgggtacgtgtacgacgcgccgggcaggcgggtggagaagcacgaactggacgcggaaggaaagccgtataaccggacgacgtttttatgggacggaatgcggctggcgcaggagtgcaggccgggaagaagcagcagcctgtatatctacagcgaccaggggagccacgagccgctggcgcgggtggacagggcggcgccgggcgaagcggatgaggtgctgtattaccatacggacgtaaacggcgcgccggaggagatgacggacggcaggggcaatattgtctgggaagcgggctatcaggtatgggggaacctgacgcatgaaaaagaaacccggcccgtacagcagaacctgcgtttccaggggcagtatctggacagggaaacggggctgcattacaatttgtacagattttatgatccggatatcgggaagtttatatcgggcgatccaatctcgctgaagggtggaataaacttatatgcgtatgcaccgaatcctctgtcatggatcgatcctttaggtcttaaatgtggatcttcgtatgagcaggccagaaataaagccctcaaatggttagaagaacgtggatttaaagcggagagagttaatataggtaagttcggttcgacaagaggaaaacctgtaggaatgacaaccgccgatggcaaaacaggatttaggatcgaatatgatgaacgaagtggtgcccatattaatgtcttcagtggaaaggataaaggcgaacatttcttatctgatgcaagtgaatctatcgtaacaaaactccaaaaattatttgatcttccatccaaacctcaaaggccaatatcatgactcttgatgatgaaataaaagagaaaatattacagctatctgattcactcttaatcattgatagctggaattctatcgctgatgagttatcagactcttttgagtggataggttcaaaaattaactggtcaaagaccagtaagcatgaaagtctgaatttaaaaggtaattatttcgattggattgatcaaataaataactttatccatgccaataacattgatagtgaaattttacatagcgataatatttattatataaatgattcatcattggatttctcagtttctattaaaccaaaacaattttatcaatttttaaagatggctattaacaatatccctcagcatcattatttcttcaatagagaaaaaaaatggtgtattgtaataagctctgagggctatatcgattttggtttttcagtatcagataagatataatgacagccgggaagaattatataaaccttcccggcttttttattattcaatccccgttcattccactaaaccagcacgtccttaattcccttaaccacctgtttagcctgataaagctgctcgcgcagcttctgctcctcgttactgtccgccatcagcacaatacacccctgtgaaatcttcacggtgacgccgcgcccggtcttaaatcccgcttcttccagccagtcgcccttaagatgcaggctggggatttgtgagtaataggtggtcatgtgggttttgctgttgatgtggcggacgctgacgccggaggcattcatatttgctgactaaataaattcttaattatccgccggatgctggctgattgtggagctcagggtgagcgagtatgggcgcgacatcctggcactgagcccccctctccccggccagctccgggcggtgatgagcaaccggctgccggggccgtattttgacgatgaaacgggcctgcattaaaatctgttcagatattatgcaccggagtgtggcaggttcgtcagtcagggcccgacagggctgtaaggaggattaaatccttaccactatccgttgaatcccgtcacagatacagatccgctgggattgtttacatgtgaattatgtagtcgcatgatagatgagactaataatagtctggatagtcttccatttaatccggcaaaaatgttaacggctagtttaaatatagctaattctgcaagattgcacacaagtggggtagccaaactcgggataggtattgctgctgatggatttattacattgtctccagtgggcaatgtttctctggcaggggggaatatcacattagcaactgcttcatataacagggcaaatttatgattatcagaatcacttaatgaaaccgacaaggataggtgctgcaaaaatttattaggtgtattgccttatagtgaacagtttgacgatccagatgagccatcaattagcgatgtgtataaagagaaattccataacatgatggattctccaatgaatttaatcaaagagatagggacattgatgtttgatgaatatgattaataaaatatccatgttgatctttattattggaagtataatcgcgataatatggatattatatgccactttatcgaaaagagggatgtttagagataatcttaaaaaaataatcaagataatatgtgatttattttgggggataggctgataactctgagtaaagaatataagagactgtacatgaaattattaatcattcgttgaataaaagccgggaaatcattataggcggataaccgcatcacggaagatatgtagtaactgtaccggtatgactgttacgggaggctgacgccggagcagatggcgggacaactggagccggagtacacaccccaaaggaaagagaggtttgtgtgtattattcattgtgtgatcatagcggtacaggtacttctgctggtttgttattcacactatcagcccctgatgctgatttatcaccaggaatatcagagtctggaggggattcttatggggcacttcttgcgggagtggcttatacagatgctcgtaataaaaatgatagttataaatatacaaaaggtgtgagtatgggacccggatttggagactggggggaactcacatgctcccggcattcgaggtgtctatcggagattttcgatctgatggataaggaatatgattggttatcaggtgaattcaagtgaaaagaaatagattttttctatcgttactatttatggtgttgattgtgttgttcgttattctattttttacatggttaggtagagagaatattaaaaatgatagcgctattcgagaagttgcgaaagaagaagttgataagcttttttctctttataataaaggggagtatgctgagatatatgatttgtcatgtgactctttcaaaaatgccactgcgagaaaagattttttaacagttatgggaactaaaatgaaaatactcggtgaatttaaagggcgaaaacttcaatatagtaatgtcattaattcaaaatccgtggagttatattatagagtggactatattaactattctttaattgaagaatttaactatattaaaaatgatggacaaaaaatatgcttgcaagcaatgtttacggatgatgcggggaaacatggggaggtaattaaattacattaacgtgtgataactccagttagagcctatcccaatgcgatgaagaattggggctgtattataactagcaccgttctataatccgggactgggaaggtatattacgcagatccaatagggctgaaagggggatggaaccgatatcattctccgctgaatcctattacagatagtgatcctcttggccttattacttgtggtgctgatagaggtgattctggcaagttattaagatgaaaaatggttgaaaataattgcgttagtgaatgctcatttatgcctttacctacaaaaagtaacggatttgcttgctggaattgtgttaacgaatgcaaataaaatcaatgctgttgatgtttttactacaggaataagtatggttaacgataaggatacagctatattaattagtgatttaatgttgagattcggtaaggaacttgatgaatctgttgctgttgttcagtcccgttgtgatgaggatgaatttaaggtatatcgagaagcggttggtttgatcatgggtgaaatgcttattaaaataatgaatccattatatgaaaaacatcccgaaataaaaccaaaaggattgaaataaaacatctggagccggaggaataatgtgtaaaagccggaggggttatcttttcccggctttttattatcaattactcattaactcctgttccgttcttttgcgtttaatcaccggaatatctccggtattgttcagcgcccccagaaatttttttaaccactgttctgcactccgtttattaatgcgggttacgcccatcccttcaatacagacaaagagtccgtgggtatgctgcggcgtgatcacgatgcaatccctcattacccgcaccttgacgggcatcccgttaataaaccccgcctgcggcatccattcaccgtacaaacgaactgaaagtctctcaacgcgtgagtatgtaagtatcccgcataatcgagccattcacatttagagatcatccgacataatcaatctgccaacgcaggagatcgctgtgcgtaaagcccgttttactgcgcaccagatcatcgctgtgattagatcagtcgaatccggacggactgttaaagatgtctaccgggagccggtatttctgaagccaccagggacaactggaagtctggatacggcggcagggatacgcgtggaatcacaaaaggctccaccgtatttactgtctgctcaagctgaattttcgccgtaagggtaaacaacggctgccggtacgcaatccctcgccactggtcacgccggaagcgctgaaccagagctggtctgtgggcgtcgttttcgcacgttcaatgttgttgatgactgtaatcgtgaagcgttgtcgattgaaatcgatctgaatctgccagctctgcgagtggtccgtgtactcgacaggattacagcaaccgcggttatccggccatgctgcgtatggataagggaccggaatttatctcgctggcactggctgaatgggcaaagaaacatgcagtaaagctggcgtttatccagccgggtaagccgaagaaaaacgttttcatcacgcgctttaaccggacataccgtacagaaatactcaattcttatctgttcagaacgctgaatgaggtgcgggaaattacggataaagggttatcagaatataactgcgaacgtccatatgaatcgcggaacaatatgataccgaaggaataccgctaacaacattatctggccggaatcttaaaaatgcatggaactaaaacgggtctatttacaggggcacctgcgatgaatttcgctgcactgaaaagcgataccggatgagagctgcttcaaattaatgtgccatgttcacggggaggttgtgcgacgtttgcataatccagcaagaactgaaaggaaggggagagctttttcatgcctgtataatcagtctggcctgtgtcagtcagctcttagtgttgagactctcattggagcgctataattgcttttccgtttcggaaaacaagattttccattaaagatcttccctgcgaggaaaagttaactaataatcttaccgtcgagttaggagatgtatgtttaaatataaacaatgttgcaacgatgcctgataattatcctctcttcgaagataagtttcccacacccagtgtggtgggtgtcattgtaatgttatcacttgaatgtaaatggaaggtataattgctttttgactagtattctattccaccctgacaacacgatgttaacatcaacactgtttatattggcaataacgcaatttttttcagattaagaggtgctctgatatatagatttttatgacattacttatttgaattggtaacaaataccaataagtacaagctgttattaccagccacggatttttccatacggtaagatttggtatggcgttatgtattctggatgtgctggattattttaatttggtaaaaaaaggtggttattcaaatgaaaagcataaaaaaattgattatcgcaagtgcgttgagcatgatggctgctagttgttatgctagctcatttttgccgaacacagagcaagagaaatcagtgaatgttagctttgccgctcccgaaaatttaaccatatcgtttgatcaagtgccgggcttaatggctgggcagaagcctgcaggtatgaatattgcgaagcttacagttgattctgcttctattaaagaatacggggctaggggggttgctaacacgacactggacgctgctggtagtgcatggaaaataactggtaaaaatagtggcacgatactcactgtgggcttctcaaataataatatgagcagaggtcatggcgcgcaaatgtggaatgggaggagctggttcacctttgataccaatgccccacttgatattgttacaataggggctcagaatatcccacctgatacgtacccaataactgtagacgtagtgggatatcagccttaatagtaaacaaccattagtgtattgcgccttgtttaaggcgtaatacacatcaagttttttatttttcttttacaatttttgatatgaaaacaattaattttgttttaatggcggtagctttgtttgcctctaattctatggtttcagtatatgccgccaggcagcaattaaattcagccactaaatcattcagcgtgaagctgggagctacacgtgtgatttatcacgctggtacaccaggcgcgacgctctcggtgagcaacccgcagaattaccctattttggttcagtcttcagtcaaagcagaagacaaaaattcgccagccccctttatggtgatgccgcctctatttcgtttagaagcgaaccagcagagtcaactgcgtattatccgtactggtggtgacatgccaacggatcgtgagactttacagtgggtctgtataaaggcggtaccacccgaaaatgaaccgtcggatacacaggctaagggcgcgacccttgacctcaatttgtccatcagcacctgtgacaagctgattttccgcccggatgccgtgaaggggacgccggaagatgttgcaggaaatttaagatgggtggagacgggcaacaaacttaaggtagagaaccccaccccgttttacatgaatttagcctctgtcacagtagggggaaagcccattacagggcttgagtatatccccccctttgctgacaaaacactaaatatgccaggtggcactcgtggtgatgtcgagtggaaaattattacagacttaggtggtgaaagtcatccgttccactacgtttttaaataagttcaaggatttagcggcagaaaatgaagttcaaacaacctgccttgctactgttcatcgcgggagtggttcattgcgcaaatgcgcacgcttacacattcgatgcatcaatgttgggcgatgcagcgaaaggggttgatatgtcgctctttaacctgggggtacaacagccagggacttatcgagtggacgtgatggtgaatggtaaacgtgtcgacacccgtgatgtggtgttcaaattggaaaaggatgggcaaggaacgccttttctggctccttgtttgacggtcagtcagctttcacgctacggcgtaaaaacggaagattaccctcagttgtggaaagcagcaaagaccccagatgagtgtgcggatctgaccgccattccacaggctcaagcggtactggatatcaataatcagcaactgcaactgagtatttcgcagttggcgttgcgtccggaatttaaggggatcgctcctgaagatctctgggatgatggtattccggcgtttctgatgaactacagtgcgaggacaacgcagacggattacaaaatggatatggagaggcgtgacaactcttcctgggtacaactgcaaccgggaatcaatataggtgcgtggcgtgtccgcaatgcgaccagctggcagcggagtagtcaactgtcggggaagtggcaggcagcatatacctatgctgagcgtggactgtactcactaaaaagtcgtctgactctggggcaaaagacttcgcagggggagatatttgatagtgtgccatttaccggtgtgatgttggcatcggatgacaacatggtgccctacagtgagcggcagtttgctccggtagtgcgtggaattgcccgcacgcaggctcgggtggaggtcaaacagaatggttacaccatttacaacaccaccgtggcgcccggaccgtttgcactgcgggatctgtcggtagcagacagtagtggtgatctgcatgtcaccgtgtgggaggccgatggcagtacacaaatgtttgtggtgccgtatcagaccccggcgatagcactgcaccagggatatttgaagtacagcctgttggcgggccgataccgatcgtcagactctgcaacagataaggcgcagatcgcgcaggctacgttgatgtatggtctgccgtggaatctcactgcatacggcggtatacagagtgcaacgcactatcaagctgcatcgcttggtttggggggatctctcgggcggtgggggagtttatctgtcgatggaagcgacacacacagtcagcgtcagggggaggcggtacagcaaggagcctcctggcgactgcgttacagcaaccagctgactgcgacggggacaaatttttttctgacgagatggcagtatgcctcgcagggctataacaccttatccgatgtgctcgacagttatcgacatgatggcaaccgtctatggtcgtggcgagataatttgcagccgagctcgcgtaccaccctgatgttgagtcagtcatgggggaggcatttgggcaatctgagtttaaccggttcccgtaccgactggcgtaatcgccccggtcatgatgacagctacggactgagttggggaacctctatcggagggggctcgctgtcattgaactggaatcaaaacagaacgctgtggcgcaatggcgcgcaccgtaaagagaacataaccagcctgtggttcagtatgccattaagccgctggacggggaataatgtaagtgctagttggcagatgacttcaccatcacacggtggtcagacgcaacaagtgggggtcaacggagaggcattcagtcagcaactggattgggaggtgcgtcagagttaccgtgccgatgccccgccaggtggtggtaataacagcgcattgcacttggcatggaatggggattacggcctgttaggtggtgactatagctacagccgggcgatgcgccagatgggagccaatatcgcgggaggtatagttatccaccatcatggtgtgacgctggggcaacctttgcaaggctcagtggcgctggttgaagcgccaggggcctcgggggtgccagttggcggctggcctggcgttaagacggattttcgtggcgacaccacagtgggcaacctgagcgtctatcaggagaatacagtcagcctcgatccgtcgcgactaccggatgacgcagaggtcacacaaaccgatgtgcgcgtggtgccaaccgaaggggcggtggtggaagcgaagtttcacactcgcatcggggccagggcactgatgacgctgaaacgggaagatgggagcgccattcctttcggggcgcaggttacagtcaatgggcaggatggcagtgctgctctggtggatactgatagccaggtttatctcactggtctggcggataagggcgaactgacggtgaaatggggagcacagcaatgtcgggttaactaccagctacctgcccacaagggaatcgcgggcttgtatcaaatgagcggtctctgcagatagccgattctgaaggagagaataatgtggatgaaaatacagcgaatgaaaacggttatctatagcgtaaccttactggttgctgccagtagcttgatgccgatagcgaacgccgcagaaaaacttcagacaacgctacgtgtaggggcttactttcgggccgggcatgtgccagatgggatggtgcttgcgcaaggctgggtgacttatcacggcagtcacagcgggtttcgggtatggagcgatgagcaaaaggcgggtaacacgcctaccgtattgctgctgagcgggcaacaggatccccgccatcacattcaggttcgcctggagggtgaggggtggcaaccagatacggtgagtggtcgtggcgccattttaagaaccgctgcagataacgccagtttcagtgtggtcgttgatggcaatcaggaagtgcctgcggatacctggacgctggattttaaggcctgtgcattgacacacgaggaggcgtagacatctgttccactcatactacctgtatcagtgaataaggcgaatactgtatatcaggttcgaggatgtattgaaaatttactcaaggcaaatatggttagcaatcttcattgcagaaaaataaattgctgattgattttaaaatctgaaattcatctttttttgtagggagaggaatattatgtttcgtaaaataatttaacggacactgatgcctttattattttctgttttgtggatttgtttgattcactcttttgtgagcggggctttataagcccctggtataaggtttgtttatctgtcaggtattcatatgtgatatttaagattttatgtttagagggctttttcttgtcccctcaggcgtaaaaataatttattttttatataaaggaataaagcatatgtcttatgcacgacatttaccggtattaatgtatcaccatgtcagtgataaacccggacagataaccttatctccccgtacgttccgggcgcagatgaaatggctggctgaatctggctggaaaaccgttaccgcagcagaggtggaagctttttatcatggtgcaagattgcctcgtaaaagcgtcatgctgacctttgatggcggctggctggataactggttgcaggtttttccggtgctgcaggagtttaatctgcatgcgcatctctttcttgtgaccagtttgatcagtgacggaccggtccgtattcctgcaggcgaactggtgtactctcatgatgagtgtcagaagctggttaaacaaggccgggctgatgaggtcatgctgcgctggtcagaggtccgggagatgcacctcagtggccttgttgagtttcactcgcacacgcacacccaccgacgctgggaccagaaacctgtgtcccgtaatccgtcggatttgcttcgtgtcgatattcttcttagtcgtaagcggatgagggagatgctgggttattgcagtcagcatctgtgctggcctgagggctggtattgttctgactatattcatgtggctgaagagctggggttcacatacctgtataccacagaaaggcgtatgaacaatccagtcatcggttcacagcgtattggtcgtatcaacacaaaggagcgaaagaatgtgggctggctgaaacgtcgtctgttttatcacaccacgcccggattttcttcgctgctggcccggcataagggggcacgtcggatagctgactgagccggagaccaggatgaaagtgctgcataccgaatcctcccccatcatcggcgggcaggggttgtaggctatatcccaaatgatggtgctgattttgagcagaaataagataacaccggaggccgtgatagacccggttgcgcagaatctggaggcagcaggtcactggcgcagggcttctacccgctggcttttggtcatgggagattttgaatgtacagaggcccagcgggagtggttgttgttgcgccggaattattgccttgcgcagatatcttcccctggcgccagtaaagctggatatcagcgacgtgacgaaatgagaggagcctgcacataggtttatgttttgagtaagcgtcttatttaaaccgtctgttctgtttcctccgctttcacaaataatgtcgagccgggtgggggactcaagtaagaataatctggcgatgttttgcttgtttccacgggatactttgttaggtgaacgatgcaattaatgtgctccagactgcgtcacagaaaaggagaatgcctttgcagaacgggggcatgacaatgaaccactttattattggtatctggttcggcgacaaccttgacgatcacttctgagatagggtatttacactgagtggtaaacaggttcaattagtaaccggagatggatgcaaaatcatgatcgattcagatgctattttgcagccaatagattttttattaagatgatatcaaggacattgaggcacacaatgacgcatcagtaagtcgttgatagctcatttgatataagaatttcttttatcaacggaagataatgatggaactgatcaataatcgtggtatgcgagactggatgatatttattaaagtggcggaagtagggaatctttcccgggctgcacgggaattagatattagcatttctgctgtcagtaaatcgcttagccgccttgagaattctattgaggttactttacttcggcgcgattcacatcacttagaactgactggagctggtcagacagcctatgcaagcatgaaaaggataacatcttcctttcagtccttgctggatgaattgcgaaatccggataaaattatcagagggagtataaaattttcggctccggctcttgtctgtgagtttcttgccaataagtggatatgggaatttacagctagctatccggatacaaaaatctacctggattcacgagagcgtagcgatttttttagtaaatccctggagtttgatgagctggtttttaaaagtggcataatcgaaagtgaggatctcgtgtatcgaaagataagccctttaaagttggttctttgtgcgagtccgaaatatatcagaaaatatggcaggatctcacaccctggcgatttggaaaatcacattattgtgggtcttcacaatcatggtctttccggacctcttactcttttccgtcaagatgaatcatacactattagtggcgctgttaatgttcatttatcttccaataatcttttgagtgttcttaatttggttttagaaggaaagggtatcaaccttattactccggcctggcttgccaccaaatacttaaaaaataatgaacttgaaattatacttcctgaatggagggtcccagatctccccatttatcttgtatggcgtcatcgtcagtattattctcctttatttcaacgctttctgtcttttattgaagataaatggaataatcgcccacaaattgattttctgaatgatgattaacccgtttggaatggttttgacacgttcctgacttaaacccacatgatgatgactgaattgaggcatcgagatatgcgactggtcagccagtcgtcttttgacgatgcccaatacaaaacatgatgccgactgacggaaatgataatatccggaaacaggacggggctgtttttgggcagccggaagttaagcccataccagaaacgttgcagtgtactgaaaaatggcgccaggttgcacctgttcaacgattttctgaaggcgcaggagtattcattactgatatcctccattgcgccttcgggaacccacaggaccagctattttaccgatagtgtttaaaaggcgtaagtaatgccgagcatgaagtcattggaggcagcctttgtgtctgcatcataagcggtatgttcatcaccagcatagtgattttttgaaatgcttactttgccagcattaatgtatttataactggcgtcaatcataatattatctgttacagcatattttgcaccgatacctgcgccccaggcaaagttattttttgaagcagacagagtttcattaataccaaaaccaacaggaatggtgttattacttagcttcacatgagcgaggccaacgcctgcgctgatatagggagtaaatgccgtactattgtgaaaatcataatagccattaaccatgtaagtggtcattcggacctgattttttacatttatgtgtactggatcaccaaatgcaataatatcctgcccgcctttagcatccgtctcacctctgaaagtggtatccagttctaaacgtactggaagctggaatggatcataaaagtcataaccgatagcaaccccgccgccaaaaacgcctttggtacggtcaggtaacgttgcatgaccattaactatctcatcctggctgaaggttgagttgattccatagacattgactacggatgtccccgctttcccggtgatatagatcccttcttttgctgatgcagtagcggaccaggctaccacaaggggaatgatgcagactgcgaaaaagtttttcatttcagaacctgccttaatattgggctaaaagacaagtttcacggtatagggtgtgatataacgattacataaacgaagcccaaaaaacggtctattgtaacgctgggttttctgtaagcgggtaaaaaatgagatgaaaattttaaataacaatacgataaccgtcggtatggaaatccatctcctcgccaaattgccccacgtacggtttcacttctacgttatgtaacaggtagtgtgagatagagcgatgctgtaacaaaaagatgaagatgaatttgtacccgacctggataaagcccgttatccaggaataacgggcaaaaatatttactcaagtgcctgggcgagatcttgttgtacctgttgacgctgttctggtgttaagactttgcttaaatcaaaataatatttaacccgataatagcgagcctgttgttctatgttactgaaggctgcaagctgctgttttacggcggcgtcatcccatttaccggatttaatcacctctatcagcgcaccgtctttaattcccttcatagaaatctgactgacgtcggtttccagttgttggtgaagttttttgatccgggtaatctgatcgtttgtcagcttcagatgctggacaataggatcctgggcgggcaggggaggattggggacagcggtggcgaaagcgccaaaagaaacgcccgccagagtcgctgccagtaaagttgtgcgtacaaagtttttcatgaagatatcctgataagggagtgattaaccgtttttattacccacgaatggcgagcaattatcttagagcctatcccattagggctattttacttgccattttggacctgggcagtgctcaaaatcctcacgtactacgtgtacgctccggtttttgcgcgctgtccgtgtccaaactggctgcgccaataacgcctggtgggataggctcttagtcagaatacgttgcctgccacattacgccacgcgaatttgttttacggagagttacggagtgaaacaatcccgccgcggtgagcggcaggttgcttacaaggtgaatggatcggcatcgcgccaggctggaaatttttcgcgatagtcctgcaaggcgacgagagaaagatcggcatcgatacgtgtcgcctggtgtggttcggcggtggcgataatgtcgccctggggattaatgatccggctatcgccgcgataatgtagcccgttaccatcggtgccaacccggttgcagcctgcgacataagcctgattttcaatagcgcgcgccgtcagtaatgtttgccagtgtagcgagcgcggcgcgggccagttcgctacatacagcgccagatcgtaatcattgcggttgcgtgaccatatcggaaagcgcagatcgtaacagagcagcggcagaatgcgccaaccgcgccactgcacgatgatgcgtttatcgcctgcggcataatgttgatgttcatccgccatacgaaatagatggcgcttatcatagagatgaaccttgccttccggttcaaccagtaagaagcgatttacggcgccgcgctcagtttgtagcgccgcgctgccggcaatcagagcgtcagtttgtcgggctttggcctgcatccacgtaatcacgctatcttgcgaaagtgagttattagcggcctccatcgcgaagccggtggtaaacatttcaggcagaacaatcacatcccggccagatacgagctctagctgtctgtcaaaatgacgcaggtttgccgggccgtccatccagactaaaggttgttgcaacagagtaattttcaaaccagacacgatcggagctcctcattgaacagcgtctttacactgtagcatgagcaataataaaaaagcggcaagaaaaagccccgcgaaagcggggcaggaaagacacgagactgattatgcggcttcgactttacgcactttctccggcagctttaccggtttggtcgccagcgcttcaggttcaaaatcatcaacgttgatactgcgcaggcggctctcttccgctttcgccaggatggcggcttcatctttatctataagccctttcgccagcgcattgcgcgccagttcatccagacgagtaaacggcagatttttacccagttctttgcagatgcgctggtggatagggtcggcagcgatgacatcacgcagcgcttcttccagtaaaccgaccggattatgttcggcgggcgtcagatactgaccgcgcccaatgcgtgaacgtgtggcgttcggcacctgtaggatcttcgccacggcgtgatccagcttatcagacggcgccagataatgacggccagtcgggaagatcatcgcggtgagcaatccggccacgacgcggttcgggaagttctgcagcagatcgtccatcgcttgttcagcacgatacagcgcatcctgtacgccccagtgcaccagcggcaggtcggcttcgtggcggccttcgtcgtcgtaacgcttcagtacggctgaggccagataaagctgactcaacacatcgcccagacgcgcggagatacgctcgcggcgtttcaggctgccgcccagtaccgccattgacacgtcagacagcagcgccaggtttgcgctcagtcggttcagatgctggtaataacgcttcgtggcgtcgccggttggcgtatggctcgttaatccgcgggtcaggccaagccagaaactgcggacggtattgctgccgacatggccgatatgtttaaacaacagcttatcaaaggcattcacatcattattctgcgctgcggccatctcttccagtacataaggatggcagcgaatggcgccctgaccaaagatcatcatgctacgggtcaggatattcgcgccttccacggtgatcgcgataggcgcgccctggtaagcacgcgccaggaagttgctctcgcccagcataatgcctttacccccagtgatatccatcgcgtcgataatggactgctggccgcggtgggtgcagtggtacttcacgatagccgacagtaccgccggtttttcacccagcataatgccataggtgattaacgatgcggcggcatccatcacataagcgttacctgcaatacgcgccagcggttcctcaataccttccatcttgccgatagatattttgaactgacgacgaatgtgagcataggcgccggttgccagcgcgacggatttcaccccgccagtggagttggacggcagggtaataccgcgtcctaccgacaaacattccaccagcatacgccagccttgtccggccattttggggccgccgataatataatcaataggcacgaaaatatcgttaccgcgggttggaccattctggaacggaacgttaagcgggaagtgacgacgaccaatttccacacccggcgttgaggtggggatcagggcacaggtaatacccagctcttcttctccgcctaacaatctatccggatcggaaagcttaaacgccaggcccaacacggtagctatcggtgccagcgtaatgtaacgcttgttccaggtcaggcgcatacccagcacctgctggccctgccattcgcccatgcaaaccacgccggtatccggaatggcgcctgcatcagaacctgcttccgggctggtcagcgcaaagcaggggatctcctggccgcgcgccagtcgcggcagatagtgattcttctgctcttccgtaccatagtgctgcaacaactcgccagggccgagtgagtttggaacgccgacggtgatagccagaatcccggagacgccggacagtttttgcagtacacgggactgcgcataagcggagaactccagtccgccatactcttttttaatgatcatcgcaaaaaaacgatgctctttcagataagcccacagttccggcggcagatccgccagttcatgggtaatctggaaatcgttcgccatccggcacgcttcttctaccgggccgtcgagaaacgcttgctcttcggcagtgagttgcggttgtggatagttgtgcagttttttccagtcaggcttgccctggaacagatcgccttcccaccaggttgtaccggcatcaatcgcttctttctcagtgcgcgacatcggcggcatgaccttacggaagccgcggaacaccggtgcggaaatcattgattttcgcatcggtgtgaggttaaacggcacgaggataatggccagaggaaccaacagccagatggaccacaggccagcgacgccaagtgcggcggtccaggcgagcagaatcaggctgctgagaaataaactcacgcggtgatagaacaatgcgccgagcagaacaaccgtagcgataatactcaaaatcatcataacgaaaagctcccttgcttgtaggaggtctgaccacttgtgatgattaggttgtagtggatgtaaaattttttagcaatgtgtttacaaaataattacaacaaagctcacattgttgccgtttttgggggcacgaaaaatcaaaagcgtgaggcgttaattcggcttatgcttctcgcctgtactgctatccggtacactgcatactgtcatttacattcatgctgaaggatatcctcatgtaccaggatcttattcgtaacgaactgaacgaagcggcggaaacgctggctaattttttaaaagatgacgccaatattcacgctattcagcgcgcggcggtcctgttggctgacagttttaaagcgggtggtaaggtactttcctgcggtaacggcggctcccattgcgatgcgatgcactttgctgaagagctgacaggccgttatcgtgaaaatcgtccgggctacccggcaattgcgatttctgatgttagccatatatcctgcgtcagtaatgattttggctatgactatattttctctcgttacgttgaggcggtagggcgcgaaggcgatgtcctgttagggatctcgacgtcgggtaactctggtaacgtgattaaagcgattgccgcggcccgtgaaaaaggcatgaaagtgattacgttgaccggcaaagacggcggcaaaatggcgggaacggcggatattgaaattcgcgtaccgcacttcggttatgccgatcgtattcaggaaattcatatcaaagtaattcatatcctgattcaactgatcgaaaaagagatggttaaataactatacccgtcatacttcaagctgcaggtgcgttggttgcgctcagaaaccccagtcacatagttatctatgttcctggggatttcctcccttaccgccttcctgcaactcgaattatttagggtatagcatattgttttctttgatattttgagatttgattggctgtaaaaattacgccttcccgcttaaggcgtttgtggaggtgatgtatgtgcgaactgcttgggatgagcgccaatgtgccgacggatatctgctttagcttcaccggactggtgcagcgtggcggcggaaccgggccgcataaagacggctggggaattaccttttacgaaggaaagggctgtcgcacgtttaaagatccgcaaccgagctaccattcgccgattgcgaaactggtacagaattacccgatcaagtcctgctcggttatcgcccatatccgtcaggctaatcgcggtgaagtggcgctggaaaatacacacccttttacccgggaattatggggacgcaactggacttatgctcataacggtcagctcaacggttataagtcgctggaaaccggtaattttcgtccggtgggggaaaccgacagcgaaaaagcgttttgctggctattgcataaattaacgcagcgttatccccgcacgccgggcaacatgacagcggtatttaaatatattgcgacactggcgacggtattacgtgaaaaaggcgtttttaacatgctgctgtcagatgggcgatatgtgatggcgttttgctcaacccatttgcactggatcactcgccgggcgccgtttggcgtagccacgctggtggatcaggatatggaaattgatttcagctcacagaccacgccaaatgacgtggttaccgtgattgctacccagccgctaacggggaatgaaacctggcaaaagattatgccaggcgaatgggcgttattttgcctcggagagcgtataatttgaggccagctgtggctgaacgacttcgtgactcaacggtttgctcacgacgtaacgtccatcaacgatagaaacagttggcggcttatgcgtctgttcaaaataatcgtagccgggttttagctgcgcccagaaatctttgtaatatgaatatttatgacgctgcatattggcgtcggtcatccggaacggataaatactcacctgcacgctcggctgaccaaagaccagcgcggcggtgacaaactggaaaatctcatcaatgccgctatcggtcatggcatagcagccgacggaaacacaggcgccgtgaatcatcagatatttaccatcatagccatgcgcgcgatcgtaggcattgggaaaaccaatgttgatggccttataaaaacggctgtctggcttgagttgattgcgctgaacgctgtaaaacccttccggacttttaaaatcgccctgacggcgtttcgggcctaacccaccggaatagttgcaaattttgtagctatcaagcaactggtattgctcacccattttgacgtagagatcaagggtgcgctcttctttaaaaatctgaatatagaccggtgagcccattaactgctgcttatactctttactgaccggcgtgacggggctgctgctgctcagcaaaccggcaaatgagacgcacggcatcagaagcatcgcaagaaaaaatgcgattttacgcatactgcttgttccttgataaaacggttacacacgccagaacggcaaaagagtccccaaatcggagtaatctggatttggagcgctcacattagcaccacggcagtttttcgcaagtccccgtgtgtacgtttacaattttcccgccgctttcgtcgtcataccttcgaatatgtcgcatttttaacgcgaatgtctctttgcgcgcaataaaacatactgtacacttaaacagtattgtgggggcgagcgatgcgcaaaatcatacatgttgatatggactgtttttttgccgcggtagagatgcgtgataatccggcgttacgcgatattcccattgccattggcgggagtcgtgagcgtagaggcgttatcagtaccgccaactatcctgcgcgccagtttggcgtacgtagcgcgatgccgaccgccatggcgctaaaactgtgcccccatctcaccttattgcctggccgctttgacgcctataaagaggcttcgcggcatgtacgtgacatcttttcccgctacacttcactgattgaaccgctctcgctggatgaagcctggctggatgtgactgacagcccgcactgttatggttcggcgacgctgatcgccagggagattcgtcagactattttcaatgaactgcaactcaccgcctccgccggcgttgcgccagtgaaatttctggcgaagatcgcctccgatctcaataaaccgaacggacaatatgttattacgccagccgatgtacccggctttcttaaaacgttgccgttagccaaaattccaggcgtggggaaagtttccgccgctaaactggaaaatatggggttaagaacctgcggggatattcaacagtgcgatctggcgatgcttctcaaacgctttggtaaatttggccgggtattatgggagcgtagtcagggtattgacgagcgtgatgttaacagcgaaaggctgcgtaaatcggtaggcgttgagcgtactctggcggaggatattcatgaatggtcggactgcgaggccattattgaacatttatatccggaactggagcgtcgtctggctatagtaaagcccgatttactgattgcccgacagggcgttaaattaaaatttaatgattttcagcaaaccactcaggaacatgtctggccgcaattaaataaagaagacttaattaccaccgcccgtaaaacctgggacgagcgtcgcggcgagcgcggcgtacggctggtggggctacacgtaacgctgctcgaccctcagttggaacgacagttggtgttagggttataagtcaggctattaagattttatcactattacgattgcgccatctaaatttcagtattactatacccgcgttttctcattctcaataactgcaaaggaggttcatcatgacactttattctctgaacgcactttgcagacctttccaggattaattttcttttattgccctggattagtctgccatttcctgattttttaattcatatatggaatggtatatgggcaattatattcgtcctttatcagatgtggtattttctatcgcatcggataacctgtggatcgaagattccgcgatccaacaattatatacgacggctaagttaaccggtatgaaacgcgttatcgggatgccagatctgcatccggggcgcggctatcctattggcgcagcctttttctcgcgtggacgtttttatccggcgctggtcggcaacgatatcggctgcggcatggcgttatggcaaacggatattttagggcgtaaatataacgccgataaactggagaagcggctggcgtcgctgcctgacgtggcggacgcgcagtggctggaggagaatgtccccgccgcaatgcagcatcattcgtggcgctctgcgctgggttccattggcggcggcaatcattttgccgagctgcagcaggtcgatcgcatcgtcgatgctgattcgttcgctttgtcggggttgcaaaaagcgcagttattactgctggtacacagtggttcacgcggtctggggcaagctatcctgcgtcgtcatgtggaggcgttttcgcataacggtttgccggaagatagcgacgatgcgcgccactaccctgcagaacatgacgatgcgctggcatttgcccgcagtaatcgcgcgctgattgcccgccggatactgcaacagctcagggctgagggcgaaccgcggctggatgtggcgcataacttcgttgaaccctgtactgtcgcgggtgaggcggggtggctgcaccgtaaaggcgctacgccagatgggcagggactggtgattatccccggctcgcgcggcgattatagctggctggtgaaacccgtcgtcagcgaggagagcctcttctccctggcgcacggcgcggggcgcaaatggatgcgtaccgagtgtaaagaacggttatcggcaaaatttaccccgcgacagctctgccgtactgggatgggtagccgggtgatttgccgcgatcgccagctcatttatgaagaagcgccgcaggcgtataaatccatcgatagcgttgtggattgtctggcagacgccggactgattacgccagttgcctgcctgcgtccggtgctgacgctgaaaacctcaggggagaaaagcgcatgatcttactgcaactttcttctgcgcagggaccggacgagtgttgtctggcggtaaaaaaagcgctggattgtctgacgaaagaagccgccagagaaaaggtatcgttgacgcgacttgaaacagagccgggacgattaccagacacgctgcgttccgcgctggtctcgctggacggcgaaaaagccatggctttcagtgaacgttggtgcggcacgttactgtggatttgtaccagcccgtatcgtccgcaccatgggcgaaaaaactggtacgtcggcattgggcgcttttccgccgacgagcacatacagtctgatgagattcgtttcgagactctgcgctcttccggcccgggtgggcagcacgttaataaaaccgactcggcagtgcgggccacgcacctggcgagcgggattagtgtgaaggttcagtcggagcgcagtcaacatgcgaataagcgtctggcccggctgctgattgcctggcggctggaacagcaacggcaaaatgagtgtgcggcgttgaagtctgaaaggcgtctgttccatcatcagattgagcgcggcaatccgctgcggatatttaaaggaatggcgtttacgccacaataattcggtgctaccagcgctgttatagggctgtctggctattcgcgtgtagccgcagcgctattcagcgcatccaggagagcttatctggcaatggatacccgatattccatattgatagcccgtccagaaatgggacgggcattttagcgctttcttacttcgcaggaatcgctttcagcaattcggtcagcagagtccagtagtggccgacgctttcgatatgtacctgctcatccggagagtgaggtccggtaatggtaggcccaatagaaaccatgtccatatccggatagggtttcttaaacagaccgcattccaggccggcgtggataatctggatgttaggtgtcttgttaaacagacgctgataggtttcccgcaccaggtgcatgaccggcgagttcgcatcgggctgccagccaggatagctgccttttgcttcggttttcgcgccagccagcttgcccagcgaatccagcatactcaccacataatctttaccgctgtcgataagagagcgaatcaggcagtgaatttcgacattcgcatcagacattgtgaccacgccaacgttcagcgatgtttccactacgcctttcgccacgtctgaattgcggatcacgccgttcggcgttgcgttcagcaggcgcacaaaggtatcgcgtgacggcgcggtcaatgcggctttatcactggcaacctcattgagttgcagcgtcaggtttttctctttttccgccagttcgtttttcagaatatcctggtaagcgttcactaatgttttcagagcgcctacgttgtctgcggcaacggcgagggtagcgaacgcttcgcgcggaatcgcgttacgcagcgtgccgccgttgaaatcgatcagacgcagatccagttcttctgcgtgcccggccagaaaacgcgccagcaatttgttggcattgccaagaccgaggtgaatttcaccaccggagtggccgcctttcaggcctttcagggttagcttaaagcacgcaaatcctgcgggtacagcttcacgggtcaacggcagattagaggtaaaatcaataccgcctgcgcagcccatatagatctcaccttcttcttcagagtcggtgttgatcaggatgtcggcctgcaaccagccggactggaggccgaacgcgccatccatgcccgcttcttcggtcatggtcagcagcacttccagcgggccatggacgacattatcatcagccagtaccgctaacgcagaagccattccaataccattgtcggcgccgagcgtagtaccgcgcgctttaacccattcgccatcaatataaggctggataggatctgtagtgaagtcgtgaacggtgtcgctatttttttgcggcaccatatccagatgcgcctgtaaaacgaccggcttgcgattttccatacctgcagtggcgggcttacggatcagaatattaccgacctggtcgcgatccacgtaaaggcctttctctttggcccaactcacaatatgttccgcgagttgctcttcgtgataggacgggtgaggaatagaacagattttggcaaaaatatcccacaaaggttgtggtgataactgagacagttcagacacgataagtctccttggcggtggtctgaaaaacgttcttacaggccacagggttagcggaattgataactcttacgagatgcgactgagaataccactttctccgcctgcgggtagtataaagcatacaaaaagaggcgtggattccgctaaacactggtttttagcgcgtcaggtctctataatctcgcgcaactatttccccctcgaacactttttaagccgtagataaacaggctgggacacttcacatgagcgaaaaatacgtcgtcacctgggacatgttgcagattcacgcacgcaaactggcgagccgcctcatgccttcagaacaatggaaaggcattattgccgtaagtcgtggcggccttgtaccgggcgcactactggcgcgtgaattgggcattcgtcatgtcgataccgtatgcatctccagctacgatcacgataaccagcgcgaactgaaagtgctgaaacgtgcagaaggcgacggcgaaggctttatcgtcatcgacgatctggtcgataccggcggcaccgccgtcgcgattcgcgaaatgtaccctaaagcgcatttcgtcacgattttcgctaaaccggcgggccgtccgctggttgatgattatgttattgatattcctcagaacacctggattgaacagccctgggatatgggtgtggtatttgtaccgccgatttcaggtcgttaatcagcagcttttcagagcgcccggcaatgccgggcgctgttttattggttacaataagcctctatgagtatccaaggaggctgcacgaatgacacaggctaacctcagcgaaaccctgttcaaaccccgctttaaacatactgaaacgtctacccttgtccgtcggttcaatcgtgggtcgcagccgcccatgcaatccgcgctggacggtaagaacgtcccgcactggtatcgcatgataaaccgcctgatgtggatttggcgcggcattgacccacgagaaatccttgatgtgcaggcgcgtattgtgatgagcgacgcagagcgaacggatgatgatttatacgatacggtcatcggttaccgcggcggcaactggatttatgagtgggcaaagcaggcgatggactggcagcagaaagcctgtcaggaacaggacgccatgcgcagcggacgctactggcttcatgcctcaacgctctataacattgccgcctacccgcatttgaagggcgatgagctggcggagcaggcgcaggcgctggcgaatcgcgcctatgaagaggccgcgcagcggttgccaggctcgttacgtgaaatggaatttgccgttcctggcggttcgcctgtcaccgcgtttttacatatgccgaaaggggatggcccgtttccgacggtgctcatgtgcggcggcctggacgccatgcaaaccgactattacaccctgtatgaacgctatttcgcgccgcgcggtatcgcgatgttaacgcttgatatgccttcggttggattttcatcaaagtggaaattaacccaggattccagcttgctccaccagcatgtgttaaaagcgcttcctaatgttccctgggtggatcatacccgtgttgcggcgtttggtttccgttttggcgccaatgttgcggtgcgtctggcctatctggaagcgccgcgtttgaaggcggtggcttgcctggggccggtggtccatgcgctacttagcgatccgcaacgacagagcacggtgccggagatgtatctggatgtgctggccagccgtctgggtatgcatgatgcttcggatgaggcgctgcgtgtggagctcaatcgctattcgttgaaagtacaggggctactgggcagacgttgtcctacgccaatgctttccggcttctggaaaaacgatcctttcagcccggaagaagagtctcgcttaattacaacatcatcttcagacggtaagctgatagagatcccttttaacccggtgtaccgcaattttgaccgcgcgctgcaagaaattaccgactggattaatcatagattgtgttaatagattgataaattctattgatttggtaaaacagttgcttcattaaaggagatcgcaatgacgttaccgagtggacacccgaaaagtagattgatcaagaaatttaccgcgcttggcccctatatccgggaagggcagtgcgaagacaatcgtttttttttcgattgcctggcagtttgcgtcaacgtgaagcccgcgccagagaagcgtgaattttggggctggtggatggagctggaagcacaagagaaacgcttcacttatcgttatcagtttggtttgtttgataaagagggcaactggaccgcagtgccgattaacgaaaccgaagtggtggagcgactggaatacacgctacgcgagtttcatgaaaagctacgcgacctgctgatttctatggagctggcgctggagccgtctgacgatttcaacgacgagccggtaaaactgtcggcataaccctgctgtcatgcctgatggcgcagcgccatcaggcacaatgcgacttatcagaactggtaggtcaaccctattgccacaatatcatcgtcattaatgcctaacgtgttatcgctatcaagctgattgattttgtaatctacaaacgcggacatatttttgttgaagtaataggttgcgccaacgtcaatgtaattcaccaaatcctcactgccgacgccctcaatatctttgccttttgacagcacatagcctaatgacggacgcagaccaaaatcaaactgatactggataaccgcttcgaagttttgggttttattggcaaatccgccggaaactggcgtcatgttgcgggtttctgaatagaaggtcgcaatataaatatcattagcgtcatacttaacacccgtagcccaggcttcggctttatcgcccgtaccgcggcgctgcagattttgctccctggtgcgatcggagagagtataagcgccgctgacggcaaaatcgctgccgccgaaatcatagctcacggatgtgccgaagccgtcgccgttttgctttttcacatcgcgatcttcgtttttcccctgatactgtaaggtaagatccagtccatcaacgatgccgaagaaatcggtattgcggtaagtcgccagcccgctggcgcgtttagtcataaaattatcggtctgggcggaagagtcgccgccgaattcgggaaacatatccgtccaggcctcaacatcgtacagcgcgcccaggttacgtccatagtcaaaagaaccgatatcttttaatttcaggccagcaaaggccaggcgggttttttgctgggacgaatcactttcggctttattaccggcaaactcagcttcccagcgcccgtagccggtcaattgatcgttaatttgcgtttcgcctttaaaaccaaaacgaacgtagctttgatcgccatctttgctgtcataatcgctcatatagtgcatggctttaacttttccatacacatcaagcttattaccgtttttattgtaaacctcggcggcgtgaacagatgctgatgcgatgatactcaccactattgccagagtgctcttattcatttccattcctgttttaattacgcgctatgatttgtcgggagacccggtaaaaaacaggaaggtttttaacgttcggtaatgaaagatttatgacaaagtgagaatttttttaaaaaaatatgtttaattgttgcggtaataaaatggtcaaattccgccgctacgcttgctgatcctgcgcaacaaaatttcacgctacgcgtacaggttgttggcaaccggagccagtcctgctaaaacgttcatttggtctttatttcttattttgaacggcagagaatcatgagtgacagccagacgctggtcgtaaaactcggcaccagcgtgctaacaggcggatcgcgccgcctgaaccgtgcccatatcgtagaacttgtccgccagtgcgcgcagctacacgccgcgggacatcgtattgttattgttacctctggcgcgattgccgccggacgtgaacatctcggctacccggaactgccggcaacgatcgcctctaaacagcttctggcggcggtagggcaaagccgcctgattcaactgtgggagcagttgttttcaatttacggtatccatatcgggcagatgctgttgacgcgtgcggatatggaagacagagagcgctttctgaacgcccgcgatacgctacgtgcattactggataaccatattgtgccggttatcaatgaaaatgatgccgttgcgacagcggaaattaaagtgggcgataacgataacctctccgcgctggcggctatcctggcaggcgcggataaactgctgctgctgaccgatcagcaaggattatttaccgccgatccgcgtagcaatccgcaggcggagcttatcaaagatgtgtatggcgttgacgatgcgctgcgctctatcgcgggagacagcgtttccgggctgggaaccggtggtatgagcactaagcttcaggcggcagacgtggcctgtcgcgcgggtattgatacgattattgcctcaggcagtaaaccgggcgtgatcggcgatgtgatggaggggatttccgtcggcacccgttttcatgcgcaagcctcgccgctggagaaccgcaaacgttggatcttcggcgcgccgccggcaggtgaaattacggttgatgaaggcgcgaccgcggcaatgctggaacgtggcagttcacttctgccaaaaggcatcaaaagcgtgacgggcaatttctcgcggggggaggtcatcagaatttgtaacctgcaagggcgtgatattgctcatggcgtcagccgttataacagtgatgctctgcggcggatagccggtcaccactctcaacaaatcgatgcgattctgggctatgaatatggcccggtcgctgttcatcgtgatgacatgattactcgataaggaacaggcatatgctggaacaaatgggcattgctgctaaagcggcgtcgtataagctggcgctgctctccagcggcgaaaaaaatcgcgtgctggaaaaaatagccgatgaactggaagcgcaaatggaaagtatcctcagcgcgaacgtacaagatgttgagcaggcgcgagccaatggcctgagcgaagcgatgctggaccgcctgacgctgacccctgcgcgtctgaaagcgattgctgacgatgtgcgccaggtctgtaatctcgccgacccggtcgggcaggtgatcgacggcggtctgctggacagcgggctacgtatggaacgccgccgcgtgccgttgggcgtggttggcgttatctatgaggcgcgtccgaatgttaccgttgatgtggcttctttgtgtctgaaaaccggtaatgcggtgattctacgcggtgggaaggagacgtatcgcacgaatgccgcaaccgttcgtgtcattcagaaggcgctgaaagcttgcggtttaccggaggcggcggttcaggcgattgataatccggaccgttcgctggtcaatgaaatgctgcgtatggataagtacatcgatatgctgatcccgcgcggcggcgcaggcttgcataaactgtgccgcgagcaatccaccattccggtgattaccggcgggattggcgtgtgccatatttttgttgatagcagcgcagacatcgccccggcgctgaagattattgttaacgccaaaacccagcgcccgagcacctgtaacacggtggaaaccttgctggtgcatcaggacatcgcagaacgctttttgcctgcgctgagcaagcagatggcggagagcggcgtgacgttgcatggggatgaaaccgtcatgcaactgcatggccctgccaaactggtgccgctgaaaccggaaaagctggataacgagtttctgtctctggatctgaacgttgtggtggtcgaaaatatggatggcgctatcgctcacattcgcgaacatggtactcagcactccgatgcgattttgacgagtgatatgcataatgctgcgcgtttcgtgaacgaagtggattccgctgcggtttatgtcaacgcctctacccgttttaccgatggcgggcagtttgggcttggcgcagaagtggcggtcagcacgcagaaattacatgcccgcggtccgatggggcttgaagcgcttaccacctataagtggatcggctttggcgatggtacgattcgtgcgtaattaatgtcgagcggtgcaaaaatagccggttgagtagcaaggctattgacgcaccgcccggttagttttaaccttctaccccgtgattcacccgcgtgaacacacccttctcagggccgatatagctcagttggtagagcagcgcattcgtaatgcgaaggtcgtaggttcgactcctattatcggcaccatctcaagttcctcaaacgtccgtattcatccataaatacactgatttataacgactttattgcttttttgtccatcaccgtccgtaaccatccagtagaatccgacactgaatgtgtataggattgtgtatatgttcctgttcggtcttggattcctatccacatgcctttaaacgatatgcagattcgccgcgctaagcctgaaactaaagcctatacactcggagatgggcaagggttgtcattgctaattgaacctaatggaagcaagagctggcggttccgttatcgttttgccggtaagccaaaaatgatctcgctgggtgtgtatccgacgatcacacttgcagatgccagttctcgtcgtgatgtcacccacccacttctgattcgggccgctggtgtaaaagtcctgcttcagccaattctctgagactggcagatcatgtttgcggtaactgaccggacggaaccggcgcgaggctttcgcccgccgcccctgccgacgcaggctggccgccacggttttcacgttgaactggtaaccctgagcacgaagctcatccgtcaggcgtggcgcaccatagcgttgttttgcgtcactgaatgcttcccggacgacgttatcacagacaaggcggaaccgctgacgctggtttatctgatgacgacgctgatgccagacgtaccagccgctacgggcaatctgaagtacacggcacatggctttgatattgaactcagcctgatgtttttcgatgaagacatacttcatttcaggcgcttcgcgaagtatgtcgcggccttctggagaatggccagttcctcatcccgttctgccagttgacgtttcagacgggcgatctcagcggacatctcctgctcgcgttcagaagaagagagctgattttgctgtttgcttcgccagttgtagagctgtgattcatacaggttaagttcgcgggcggcagcggccaccccaatgcgttcagccagtttcagggcttcctgacgaaattcaggcgtgtgctgcttgcgtggctttttggtggttgatgctggttttgtcatgtgagtcacctcttacttgtgagtttactcacttagtcgcgtgtccactattgctgggtaagatcaatggcctcgctgaccagtcatgacatgaacgccgtgcatatccaggatcttcttgcggtggatacgtttattccccgcgcggtacagggtggcattgccggggaatgttcaatggaaaacgccgttggcattgcggcgatggtgaaatccgatcgcttacagatgcaggctatcgccagcgagctaagcgcccggttaaataccccagttgaagtcggtggtgtggaagccaacatggctgtggctggcgcgttaacgacgcatggatgcgccgtgccgctggcgatcctcgatttaggcgcaggatccaccgatgccgccattatcaataacgatggcgcagtacggcgttgtcgccgggcagggtaatatccgtggtactgaaggcccgcgcaatgcggtagcgaccgggctggttttagccggagaagccaaaaaatagtgcagaaaacagccgcgcaagcgtttagctgcggggtaagtcaaagaaaggcgatgttctctttgatatcccggcggagttgggtacatagtatcaaggtgtctctcacgtggttaattttaaggataagagcatgccaacagcaattgaaaaagccttggattttattggtggtatgaatacttcggcgccagtgccccattcaatggatgaaagcaccgctaagggaattctaaagtatttgcatgacttaggtgtgccagcgagtccggaagttgtgatggcacggggtgagcaggagggatggaatcctgagttcacgaaaaaagtggccggatgggcagagaaagtcgcctccggtaaccgcatccttatcaaaaacccagagtatttttcgacctatatgcaggagcagctcaaagaactcgtgtgagctgactatcgaataaaacgctaacggacgtttccatctaaggatggcggcgttcagaaggggttgccagtgacagttttggactgccgattcatttcttttcgtcaaattaatgtctatatatttattgaataaatatatagttcataacttactacgttgccattaccgcgtcattcttagatgatctacatttcataaaacacttgattccatttcgtctctattaagaaaaataaaatgtgaacgctgtcaattctgtaaacgtaaaagataaatattgtatacacggatgtttgttggcaaacaggcagatggcaatcaggatcttttacggaacattgtgtatgaaaaataatattgaagagacaataggtaagtacttgcctattttaatgatattacctctggcgggtttggcagagttagcttctttatattcaatccaggctttattaccaaagttaagtgaggtttataatatcccattgaatcaggtagggatgattttgtctgctgaggtggggtttctggcattagccatgttatttagcggcacgttatctgaccgttttgggcgaaagccaatcattttttattcgttgctggcaggaggtattttaactctattgtgcgcaactgcatcatcatggccgatgctggtggtataccgcgctttgctcggcattgcagtaagtggtattacggcggccgttacagtctatatcagtgaagaagtctctcctgctttggcagggattgttactggatattttatttttggcaattcgctagggagtatgtctggtcgtgtgtttgcaactttgatgatggagcatgtatctatagatacgattttctttatcttcggtggtgttctgattgctatggcactcgcggtgaagttgtttctcccgacatcccgacagtttgttcctacaccttcactacagcttggtgcagtgttgaaaggcgggttggaacattttaagaatatccgcgtatcattatgttttgtcattggatttattcttttcggctcttttacgtccatctttaattttctggcgttttacctgcatcgaccgccttatgagctgagctacacctggataggtttgattccagttagcttctcattaactttttttcttgcgccatatgctgcccgtgtcgcgttgaatattgggtcgatgaatgcgctcagtatgctgatcatctgtatgatggtcggtgcatttcttacgctaatcgccccttctctgtgggttttcatttcaggtatcgttttactgtcagtcgcatttttctctgctcattccaccgtattagcctgggtcagttcacggagtccaaacgcaaaaggacaggcgacatcgttttatctgctttgctactactctggcggtgcagtaatggggtatttaaacgggtatcttttctcctggcagggatggaatgctattgcggcatcatgtctgatgatgctggggataggattatttatctgccggtttattttcgcaaaatatgagaaacaaccgcaaatcaaaaaacagtcagttcaggagagtttctgattatagacacgaagtgtgtttttatactttccataatggaatcatcattttttcattaatgtgtcactatagctaaaagcttaaattgtgaatatttggctacccggatattcgttgctccaggaatatatatgtctgctaaaacgctgtatgaaaaattagttgagtcacataccattcgtgaacttgataacgaaggacatgttttactttatattgatcgttcaatactgaatgaatataccagcccgcaggcatttagcgggttaagagaacgcggccgcaccgttcggcacaccgacacgtttttattgaatattgaccatgttaatcccacgcggtcgcaacgggatgacttaatgaccgatccgggaggacagctacaggttgattactttcgggaaaatgccgctgactttggcatcacattatttgatgtgctggatccgcgtcaggggattgaacacgtggttgctcatgaacaagggctagtgatgcctggcatggtgatcgccgccggggatagtcacacgacaacctacggtgcatttggcgcgctgggctttggtatcgggacgtcggaaattgaacatctgctggccacgcagacgctggtttaccgcaagctcaaaaccatgcgcgtaagtgttcagggagagctacctttcgcctgttccgcaaaagatattgttcttgaattgcttgaacgtattggcgctgatggcgcgaccggatatgccattgaatttgtgggtgaggccatcagcgcgttgagcgttgaaggacgaatgacgctctgcaacatggcggtagaagcgggggcgcgtggtgccattattgcgccggataaaaaggtttttgactatatctacggtaaaccgcaaatgcctgtaggtgaactctggcagcaggcattgctggaatggtcacagttgagcagcgatgctgatgcggtatttgataagacggtggcgatcaactgccatgatcttgagcctaaagtcacctggggaatcagtccggatcaaacaggttccatcaccggacgtgttcctttcccggaacaggaaaccaatccgcttaagcgcctggcgcttgagaaggcccttcattacatgggattaacggctggcatgttgctgaaagatattcgtatctctcacgcttttattggttcatgcacaaatggtcgcattgaggatttgcgtgccgttgcgaaggtgcttgaagggcgcaaaatcgccagccatgttcgcgggatcattgtgcctggttcaacaatggtaagacgccaggcggaagaagaaggactggcgaaaatctttattgctgccggttttgaatggcggcagtcgggttgctcaatgtgccttgcgatgaatgaagatgtattgtcgcccggcgatcgctgtgcatcaggtacgaatcgtaacttccctggacgacagggcgctggagcaagaacgcatttgatgagcccggcgatggttgtggcggcggcggtagcggggcatctggtcgatgttcggtcattacttcaggcaggggaataagatggatacgtttaagcaaatcagcgggcgaattgcgccgatgctggaaccgaatatcgacactgatgtgattatgccaaaacagttcctgaaagggatcgatcgccaggggctggataaaggggtgtttttcgatcgtcgctttatggctggcggccaaccaaatcctgattttattctgaacatgccgggctggcagagcgcgacattcctgctggttggccccaattttggctgtggatcgagtcgtgaacacgccgtatggggattaaaacaactgggaatacgggggctgataggtagcacatttgcaggcattttcgatgataactgccaacgcaacgggatcctcacggtctcattagatgaacctgctttggcgcgcctggcgcagcttgccgcgagtgctgataccaattctatcactgtttcactcgatcgctgcgaaattacgacggcagaggaaacgatctcctttgtgatcagtgaactcaaacgggcgatgctggccgcaggcgaagatgcgatagcctggacattgcaatacttgccggagattgaaaattttgaggttgcgcattattcacggcggccgtggttaaaacgccctgcatccccgcgcggttaaggaagaagactgcaatgaaactggttcaatatcttgtgaacggtggcaaacgctacggcattatgcaggaaaccggaataattgatctctcgcagcggcttggcgacaaatatcccactttgaaatctctactgtgcgctaatgcgctgacggatgcggcgttatggtgtgatgagccggcggattattactaccaggaagtcacttttctgccggtgattgacgatccgcagaagatcatctgtgtcggaatgaattacgccgataagcgtattgagtttaatgaaaccaacccggccccaaccctttttgtccgttttgcggattctcagaccgggcataatggcctgctgctgaagcctgaaaataccaatgagttcgactacgaaggtgaattagccgtagtgattgggcggccatgctcccgggtcagcgctgaggatgctttagattatgtcgccggatacagctgctatatggatggttcagtgagggactggcagcatagctggtttacggctggaaaaaactggccttcgacaggatcattcggtccgtgtctggtgaccacagacgacattcccgatccccagatgctacgtttactgacacgactaaacgggcgggaggtgcagaacgaatctacggcaaatatgatccatcctatcgcttcactcattgcttatataagcacctttactctgctttcccctggcgacacgatcctcacagggtcgcctggtggagtgggcaaaaaacgcgttccaccgctgtttttacacgatggtgatgttattgaagttgagattgaacatattggaaccctgcgcaatgtcgtccgggatagccgttatttaacatcatctgttagctggcatgacgggagaaagtgatgagtacactgattgaatgcggcgcctctccgtttattccgggggttgcgctcaaggatgttcgtctggaaaatggtctgacggtaagagtggctatcggaggcagcggttcacctttggtactgctacatgggcatccgcagaatcatacaacatggcggaaagtcgcaccgacattggcgcaaaatcatacagtcattttgccggatttgcgtggctatggcgacagcgataaaccaacgagcgatccggcgcaccgtacctattcaaagcgcaccatggcgcaggatatcgtcatgttaatggatgcgctcggcttttcccgttttgcctttgtagggcatgatcgtggcggacgcgtaggacacaggctcgcgctggattatccggatcgtgtgacctgttgtacttttatcgacattgctccaaccgcgacgatgtacgccttgaccgataaatcctttgctacgcgttacttttggtggtttttcctgattcaacctttcccgttacccgaaacgatgattgcgcacgatccggcattttttctgcgtaagcatatttctggccagctaaaaatagagggcgcgacctcgcaggaagcattcaatgaatacctgcgctgttaccagaaccctgagatgatccacgcgatctgtgaggactaccgggctgctgcgacgattgatttggacgatgatgccgcagatacgtcggcgcgtatccggtgtccgttacagttgctgtggggagggctgggaacggtagggcaactatataatgtggttggtacctggaaagaaaaggcgctaaacgttcagggggaagcattgccttgcggacactccccgcaggaagagtgtcctgagtactttatccagaaacttcagtcctttttacattcagtgttataactcggtcatcctttgcaacttcgcactgatgctatgaaaacgacacctgtaggaaaaaaacatcgccagccccttgagggctggccttctgttgaagatcttttcgtttttgtcaccgttgctcgcaacggtggatttgcccgggcagcgctggagctggggttatctccctcctatatcagcaaacgtatcgctatccttgaaaaatgtctcaacgcccggcttttttttcgaaataacagagtgatgcgtctcacaccggaaggcgaaaatgcgctgggtggggctatgcaggtcgtcagtgaaatggatggttttgtcagtcgtttggataatcaacgtggtgtgttggctggtaatatcaccatcaactgctcatttggttttgggcataaatatgtcgcagaggcgctgtcgtcatttatgatcgcctatcctgatattacggtaaaactcacgctaacggatcgtgaagtggatctggtggaagaggggatcgatattgaaattcgcgttggggatgatatcaacgaattgtatatcgcacggcagttagccactaatcgacggatcctgtgtgcttcccctgaatacctcgaacgccacggcaagccagagtctgttagtgcgcttgtgcagcacgattgcctaatgattcaggaaaaaaactcggcatttggcaattggatattaacggacggtaagcagcagacacattgccgactaaacggttttcattcttccaacagcggcagtgtggtgcttatttgggccttgaaaggccatggcattacattgcggtcggaatgggatgttgcgcagtatattgaacgaggtgagctggttcgcgtgttgcctcagtggtatcaggaagcgaatatctgggctgtatatacccggcgttcatcaagttctgatcgtatcaaaatctgcatcgatttcctcacggagcatcttgcacaatgcttgccaggcggtaaagcaccgggcgtactgtgatcagtcggcgccaactgtcgtggcgccagatgctctgacttacgtttactgttaggtgttctttttgccagcacccagtagcttttagggcgttgcgttggtggcgcggttttgtttccgctatcgtggcaaagttatcttttatcccaccacgaggcccaacctccacatagatacctccattattaccggatttctcacctggttttaacgtcaaattttatctcctgatttttgggtgacgattatcggaggttgagaattctattggtatcggctggatggcattgtaagtatcacacactcactccataacaatcagattgattgagcgactactttagctcaatagatatgtgttcatcttaagcgtattatcgcaggttggtaattaaaattctttaaaaaacaataccatccatcaattcaatatgctgatttttcgaggttttctcaaatttagttatgcttatgtaatgctacctaactgactaacagtaatgctcttttcacacaaaagccttaacagaggaaacgcaatattacgtgacttaatgcctctgctcattctcattagttataccaatgtaatgttttctcacagcaaaagagaagtagctacctgtgcagcattataggcggaaaatccattgggggtattaccaaagatgaaatagaaaattaatattattaattaaatgaatatgaaataggtattgttcctgttatcgttacaaccttttctgtcataacaatcttctcattttctttctcgcatacttgctgagcatggtataaatgtctatgaggacgtcagctcggaaaagcattcgttctgcatggtatgcctttcgctattctcaggggcgtgaaatgaaagttttctttgatggagtctatataactatatgaaattgataataatcctccttctcgcgctattcccgttatgttcatctgccagcaatcattatgcccttgtttttgaaaataacacgatactgcttgttttaaatcttaaatgttctccctgtgatttaaactgcgcaaatattcaataccagattttcaataaagagacggagtctgttatttcaggggttgctaagcctgtgacaacgggcatcgaaaataattttcgtggttatatgatgcgtaataataatacgttctacacattaattgaatcagataatgaaaacgtatgggatatgtctgttgaggagaagggaactcaacagaacaaagatgccgtgcaaaaagtaaaatatcagcttaatgctatttttgacaatggtacatgctgagtctggcttgcctcagggatacgatcgtatccctgaatatttcccatcaaaactcaggaataaaatcactcttactaatatatttttccagtatggcggtatattgtcgccagttcccggaatcattgattactgcataatttatcgatgctcccggcgttggcgagcgtgttagcggcacatcaagtgctgttttcggcgcaaccatgatatcgccgatacttttcttgttatccatcgttaacgttaaactcatataccacgaggtggggttaactatccgtatagtattttctttagcaataaagcgtaattttttctcctccgcttccgtgggcgcttttaattcggtcgggcgaattaaaatttttagccgcaaacgaagcggtaataccagttttcgcgggtggtttttaatgtcctgggtgactggcggtatctgataaatgtttagccagaagagactctcccggtccgttgccagctgctggcgggaactcaggagcaggcgaagcgttctcagttctcctggctgcattttaaataccggcggcagcgccaccagcggcgttttgctattatccggagaggcgtcaatgtttccggcgtcggtccatacctgtaacagcatcggcgttgtattatcgttggataatgtcaacgattgagcgacatcatctgaagcaaaaataattcgggttctgtcaatattaacggcagcttgtgccgggccataccatcccgtcaacccaagtagcgttaatatgactttactgaaaactaaccactgcctgtaattgcgcattcacgcttcctgccgttactgtttgtccgccgatcgcctcaagcgaggcagtaaaatcaccgctataggtttctactgaaccggatgatacccgtgtggttaaatctttatagccataccagcctcgggcgttgccagtgcctgtcttgatccgatcgggtaacaggttaatcggcgtaccggcatcgttatagatgcggatacccactccggaagctacgccaggttcgccataatgggtgtccagtagccacgacagaccgcctgcggatgtggttagccccaggcgacgcgccgccgccacggcggtgggttgattaacgacaaaacccattgcgacattagcggcgctggtggacgggagggcactggacacggcaccggactcacattccaggctgacgtggaaaggcgcctgactattgcctccggcggctaatatgccgacggcgacagggggaattttcacgatcgcaggataatctgtgattttacataacgcgccgcgaacataggtgacgctattatatgtactccatgccccgggccaatagctgggccagccataataatcgctggcatgatccagtcccgctttgatccgctcggtaatcaagcctgggcctttaaacgcgatataaccccgaggctgcgtccaggtatctcggtccattggattctggtaggcaaaatattttcttgagtcaattttaaacatctcatataacacgttgctaaacgcgctggcaggaatataaatatatttgtcatcctgaaaccaactgtctgcggtaagttggcgttctttccagaagcggctgtaatattcgccggtactgaggtttgtcatacggacagcaacattacgctccacatcataataagcgccttctacttcgggagtaaaaaatgcccccgcaaaagcgctatcgccatttgtcgaatacatctcatagagcttcccggcatcggcggaatcgcagcggtaaagtacctgtttactggaatagggcgtgccggtggcggccgtcaggaagttaccgatcccactggccaatagtgtgccggagggttgaaaagtttcactattactgacgctaatcaccgttggcaaaccgatattaccggtattcgtgtcagttgcgccgatccagttttgcgccgtgtagcccgcttttatcgccgcgtcagagagcgcgctcttatcggtgactttgatacatgacgaccatgttccggcgctgacgaacaggctggtgataaacaatagcgttcggaaactaaaaagcattgtgctattccttctcgcagattttgttcagatagagaaacggttctttggtgtgaagatcgagttggtaggcaacccggcaacgctggtttgcccctgttccccagcgcaccagtagagaacccgacggatgggcgatacgggcataaatctgcccactctggccgaccatgccgatgtttgtgccttcaccgttgaaaacatcagcgcccattggcggtatgccgccatccggcatcttcacggagatcagcactgctttgccgctgatagtggcgaaattgacacgcgcgatggcgccggcatagggcacaatctgctgacttcctcccgtcagttcggcatcgctgcgcatcttacgggtatcgagcgtaacgttattgacgcggtaaggagataacgaaggcagaatggcgtaaccaaagcgatcaaccacagcgccctggccattttgtacgatcgcgccctgcgcgccatcggcatgaataagcgcaaaggtatcgctggtataggggccagccgtcagaccgccagggtgaagaaccagggtgccggacgcgcccagcccttcctgacgatagttatcaccctggtcatagttggcgcgaagtgcgccaaaccgggtgttctgttgtagattaccgccaaacgtcgttggcgcgctgctatcgctattactattgcgataacgctcgtagccgccataaaccgaccatgacaggtcgctgttttcaccgctactgccggtcatggatacggttgaggaacggctttgactggactggttataattcatggcgacagacgttctgttttcgccccaatccagcggtatagagacattaaacgacattgtggtttcggtatatttttgtcggctactcacgtccagtggttcgttgacgccgtgataaaagcgatcgtaatcccaggtggtgcgctgtcgtgcgatattcaccccgtagcttatattccgccactggttgctataccccatttgtagctgtgttatacgcgattggttattgtagtagtctgcggtgctggcgctgaggttaagcgtgccaagccgtcctaacggctggcttaccgtcgcggacaggcgattgcgctgatgcagcgtgtcggagtagtaatcaatccccgtttttgcttcccggcgtacgccgagcacgtcctgaagatcgcgaaagccgttggttgaataacgataagccgccagtaccaggttagtgccggtggtaaacgttttgctgtaactgagttccgcgcgccagccttgctggcgatcgttatgctctgcgcgcgcgttcgaccaggtggcgttaaggccgaacgcgcccataccggtggcccagacgccgcccgccagccatgcctggtaacgctgcgcaattcgtgaaccgaggttgagggtaatggtgttattaacgccgtgctggaacgttccctcaaagaaacgattttcaatatcgtagtactgacgaaccctgccgaaggccagcgaatagtgccagttaccgggacgtaccgaatccggcacggaagaataaggcacggtgaaacgtgaggttttaccgctggcctcgataacctctacctccagatcgccttgataacgggtgttgtacagatcgtcaatataaaatgggcccggcggaacgttggtttcataaatcactttccccagttgttttactaccacgtgcgcgctactggccgctacgccccgaacttccggcgcataaccgcgtttgccctgcgggcgcatccgctcgtcggtgacaagtttagctccgttaaaagacagactgccgaataagctggagtccgtatagctatcgcccagcgacagaatactgttaatagacgcgacaggtctttgcacccaggttcgaacgctattatagcgccaggcgcttccgctctggttgctattggcatagcgcagattactttgatgacggacctgccaaagtccgaggttaacgcccatgtttaaaccgctccataagtattggtagcgataatggctgtcggtattttcggtgtgggtccagtttgtgttatggcgtaaaaacagcgccagcgcgccgctatcccactctgaaggggagatataaccgcgcggtttgtgcgtaagttcggtcattggaatcgttagcaacaggcgaagcgtggcgctatcaaattgccaaccggcatgaggcacccactccctgagcgggcgacactcggtcgcagcgtcggtcgcggggagtgattttatctgtgctgctttcatcaccgataagggcaggcagggttcagtctgttgaccctcttttacagcattaaatcgaatattagtgctcgaggttaccagcgtgccattaacgtaaacgtcggcaagatagtctccggaaggcgtttgctgttcattaaaacgggcaatattttgtccgtaagtggccccctgaagtagcgcaggagcaaaataatactcttcaccctgcgcggagcctgagcaaactatggcgatcaatagcgcaaggcttttgcggttccaattaatggtgggggacatcgtagctctcgcttatccttgcgcccaggtcgttaaccaaagtaacggtgactgtaccggagaaggatttgagtgaccgtttgcccggcagccaccaggtttgactggagaaaggggcaatcatgtcagcatccaggttatacgaagcgccgttcacttttacattcaggttacttaaagaggcaaaccagggctgcggattaacaataacaataccgctttttccggaacccttatttaccgttttaatctgtaattttttcgccagattatcaggtttacctagcccgtcaggacgatagaaaagttttattcttgagcgcagcatcaccaacattttattttgcccactgtcgctgccaatattcgttggtggtacctgtaatacgttaaaccagaatactgactcacgatcctgcggcaattttttcgtgttgttataaattacgcgtaccacctggcctgctttgggttgaatacgaaataccggcggcgtggcaatgaacggcatcgcgctgctattttccgggctggtattcatatcgccatcgtcaaaccaggtttgtacgatataaggtattgcatcattattttttaactgcacatctacggaggaggctgttgatgggtaaattattcggctacccaaaatagtaacgctcgcccacgatgctgtggcgggtagggccagcaatagaaaaactattaagtaatataatgcggaatgtcgggtatccattttcatctcaacaactccctggcgattgaaaatggtctggcgtttcaacgccagaccgtagcgacgattatttatacgaaacggcgtattgtagggtggcagcgactgtcccagcctctgctttcccggtagagtaataccgcgcggtataagtcgcgctcgcttcagaagcatttggttccagctgtaggtcgccgtcgccagtaaagccgccggtcagattgattggctcccctgaggtgtcgagtaattggacttcaacatttttcgcgctgccagtattacccaggttaccgttactggtgacctgattaccgacaaagacagtggaaatttttgttgttttgtcctgagagccggtacatccggacagcccaatatcaaacgttattggccccgcggttttcccttgttctgataaatctttagtacttactgttggtaataacacgacgggtttagcctgattaccattaatcacgacagagcacgtttcatcagagacttccccttgaaaggtgatggtgttatcagaaacagccatcgcgctgctggagacaagaagcgagcctgtgatcattgctaaatattttttcatagacatatgataatgttcctgtattaatctttactttttcagaacgagtgcaattcgcccgaatgtttcgtgcttatggaggagtggtaaaaataacgatcattaactctatttttggatgtgagctataccctcctgactattgataatgcgatataaaacaaacagacttatttctctcatcatgaaatagagcgataagcgctttcgtccatacatctcattagtacaactgatagtgttatcatttaattgagtgtaatccgataacaattctctccgcgactgaatagatagactatgttgcaatacaacctgcacatttttgctatgtaaaatccgtatcagttaaacctcccgatggataatacgatggtgagattaaggtaaattttctgaaatgtgcttctgaaacagtataattagtcttacttttttcttacttttggcctttcagaagtttcctgagtttgcgttaaggtaaagaaaagtgttcagatttacctataactgtttgatttgtaatgtgcaggtaatacttgtgtcaattattgtttactataagtgagagttataagttaaactcaggttaattagggggctgaattcttttttgagcatgataatatgtcgtctgaatgatggatgcagttacctttaggattgtcatgaatgaaagcatatttttacttgataagcgtgttgtatttgatagtacgaagatgaccttatcgcatggtaatgagataatcagaatatcagaagctgagacccatctgcttcttgctttttggcatggtctttacaaaaaagaagatattattcatttagtttgggaaaatcgcggaggctgcgtctcagaatcaagttactataaactcattaatcaaatgagaaatgattttagtagcatcggtctacagccatctgacatcgtaactcgccctcgggtgggggtgtcgctgtctgttgccattgaacctataaaaaaaatcacctccctaaaggtgagtgatgaaaacgttaaaggcccctcgactcgggagaaaatattttacaaaattaaacgtcacagcgtatttgtggtattaacaggagccattcttctggcattgctctatggtgtatttactatatataaagcgcctgttcgtaacagccctgatagtttttttacatatcttggcgaatataacgattatgcaatctataaaacaaaagaggataaggtcacattaagtgaagtagtttttgcttttaactctctaaaaattaaaatttaccggcaaaatggacgccatctttattatatcagggagcctaacatgaatatttttctgcaatgcttaaatcctgttgaaatggcggtgccaaaatgtattacagtaaaagaacgttactgattatatttgtaatatttatcgccattgtcgcaatcggatcggtaatagcgcttgaatgggtaaatcgtgactcttatagaaccaataatcttatatgcacgacaaaatcagaagcgtatattgaaccacgaaaattgtacatggatggtggacttgtgctggatcttaaatccggcaggattaccctgcactacgatgttactaccgatacgaaagagaaacggcttttttttcgtgatatctgcatcagcaaactgcgcagaacgggtatgaaaacatttacttttaaagtcaattcagttaagacttttgagtctgatactgctggcgatttgttttcctggttgagactgttacagcctggtacgattaatgagttaaagatggtcaaaattgggaaaaatacctacatgttttcgcttaatcgacatttgtataatgtgtgtaccaccagtagtaacgttgagttgtagccaataatccctgtattgatgggaattcgttccgtgattgttatgcctcatcaggcagcgaacctggcatctggctaacatattgaatttagatatctgctatcgcttattttaacgatagtatcctgcacctgttgggtattgatattttcttgtctattttcggcacagggagtgccatcttgctatcattaagaacgtataacctatctctcaatattgcttttctatattaatgttactttagttatcctataaaagcgtacagtggcaaaaggaaggccggtaagagggcaatgatttgaaagtaagaaagctatttctgatgttgtttattgccgttccactgatcgtaatgatattggtggggttactcgcgggtatcttccagctaaaacgagatatcgccgtcagcgccaatacgctgctgcggtttagcgcggatatatctgccgcctcctggcaagtcgccggaaaagccgccagactggctgagagttcctgcactgatacgctgaaagaactgtccagaacgcgggccttcactccttatgtacgtgacattgggtttctggaaaatggtgatatcacttgctcctttgtcacaggaaccgaacgctatcatttttcccggctggcagggctttccttacctgcttcttatccggaacggtggttgcgatctatcggtagtatggccgaaggacccgatcgccttgttgtggtttatgtgaaaaaagtagcagcgaataaagcggccttcgtcattgtggattcgcagtatgtccaggagctcatagagatattggcagcagagagagcatcagcctttagcctgacattcggcgcaggggaggcgattaccagcgctgcgacgttgcgcggtaaggcgtttttaacgcagcggttcacctcaaccgatcacactctccagctgatggtgcgaacccccttctcaacgttatcggcatactggttacaaaacctttttatttttgttccgctgtcattgtgtctttctgtagggatgatgttgttctacaggcgctggtatttaaaacgtttatctctggcccgggagattgccaggggaataacgcacaatgagtttacggtacattatcagcctgtttttaatgttaaacacggtagttgcggcggcgtggaggcgctaatgcgctggccgcaaccggatggccgttttataaccccggatatttttattaccgccgcagaaaatgaaggcatgattattccactctctcgtcatctgttcgaactgattgctcatgacgtaataaactggactgtaccggatgatttctatatcagcgtaaatatatcgcctgcgcatcttatggatgacggttttatacaagatatagaggcgctcaggactcgtttgggaacgataacgcttatgttggagctcaccgaacgtagcctgattgtagaaccttcacaggtcgcagaaaaactttcaacgctccgtgaaaaaggcgtgttaatagcgattgatgattttgggaccggctattgctcactctcctatctccagcaattacctgtagactctcttaaaatagacagaacgtttatcgataccattgataccagcagcgatgatgttcctgtcctggatactatcattacgctgagtcagcgactggggctcaatgtggttgccgaaggggtcagtacccagcaccaattgcgttacatcttaagccacggggtaggattcgttcagggatttctttatgccaggccgatgggggctaatgactttatgagctggcttggcaagtcggcccagaggcaaaatggtttgctcaagggggaaaacgaatctgcgagtggcctggtggctgaataatacaggagctcgctacggaaaaaaattcaatagcgcgatatatcctggtaatatgtttatgccgtgaagaaacgtgatagcactggggcggatatttttatgagtcagaacaattatctgattgacaaaagagttattcttgattgtgaacgaatgacgctttcctgcgccggagagtcgataacgatatctgaatcggaacgcagtttgcttatcgcttttcatgaaggcctttttaaaaaagatgatttaattaactatgtctgggggcgcaaaggtgtcgtggtctctgatgccagttattataaattgattaaccagctacgagggtcatttgataaaattggtcttaagggggcgtctgttgtgactcgccctcgcgtgggtgttttactctccgtttccattgaaccgttgagtgatgaggcgcaaaatactccgttgcctgctgttgctgaaacagaagtatcgacggttgaagtgcggcacgatgacactattattaccccaataccgggcgctgtgaataaaaaagattggctctacttttgcctggccgcgcttctgatgttttttatgatgtataaagttaagggtgaaaatattgattattttaccctccagggttcgtatgatggatacactttttatagtgtcgggcatgataaaacccatctgacggatatcgttgaagcgtactctgagatgagtaatgaaatacataaacaaaacggaaaaatcatttattacattcgcgttcctaatacaaatatttttgtccagtgtcttaaccaacttgatatagcggagccgaaatgcatttccataaaagaacgttattaagcgtggcgacgcttggtatgctggctgtttcagtcgtactgatggtagtttgggtacgaaacagtaaccatagttctattaatactaatgaatttttatgtacgacaagaacggtaacgacgatacaacctaaagatatccatgccgatggcagtcttgttcttgattttaagatgaagagaattacgcttcaatatgaaataaaaacaaaagataacggtgtaaaaatattataccgggacgtatatatgaaaaatttacatcgaacagcacctggtgtttatacgttcgaagtatcccaggtaaaagtctttgccacggacacggctggcgatctgttatcatatttacgggttctgcatccggaagcggctaatgagattcgaatatctaaagtgggtgagaaaacctttttttattctcttaatcggcagctttataacgtttgtaccgcgcagtagatctgaatgttgtctgaatgcgtcagaaagcgagttgcgaaattgccctccgcaagggtaaaggttaacttgaatgttaattaaaatctatataaaacagttatttatgaatttttgactcttcggaaaggtgactgatactcgctgataacctctcgcagtccgcctgacggatgcgatgccaggatcggtctgaagcaactatgaatccgccattaataaaaaagtaagaactctgtaagactgatttcatatccattatcgaatatatcaggttatattacctccgcagttggcatgactggtaataagcgcattaggtgttcttaatctaaatgctatttgtgtgccataagttccggtaccgccttaattatatatcaaaaatggagtggttttaatgaaaagacggtcttcgttccttgtttttttaggtttattattagcgtcacctttagctttggctaacgatcagcacaccgtatcgtttggttatgcacaaactcatctcagttcattgaaaaatagcgatagcaaagatctgcgaggctttaattttaaatatcgttacgagttcaatgagacctgggggatgttaggatcattcaccgcgacgcgcaatgaaatggagaactacacctggaaagaggggaaattgcataaaaatggttccgattctgtggactatggttctttgatgtttggaccaacatatcgttttaatgactatgtgagcctgtacggcaatgcgggtatagcgacgatgaaatttaataaacactcaaaagaagagtcctttgcctacggcgctggcgtaatatttaatccagttaagagtatatctatcgatgcatcatgggaagccagtcgtttcttcgctgtggataccaatacatttggtgtcagcgtaggttatcgcttctgatattaaaagtataagcgttacgtttatggcaaggaattaaaaataatatggcgctgctacagaatagggatggttatgagcgctcaggtaatcttaagaggaagataaaacactcaccgtagcgttattctattgatgaaattatgataaattcactatcggaacaacttccgttaaaaacgataggtatagttttaacggatgattattatacttatttaggcatcgcttcactctttgaggatgggaagtgctttatgttcccactcaatggagaatataattcgtgtcagatatcagctagcgaagatatcataattattattgatggacgagttttgattcagggggtctggaaaggttttaaggcgctcatgcagcattatccacatgctcgtcgaatctggctcacgcgcagagatattggaaaactttatccacatggctgcgatagagatcctgatatcgatcccgatttggcaaagcctgtttttattgagcatttcattaaatacgcttgtgcaaacgaagtagcggtcggtgaacttgcgccgttgacaaaaaaggaggaggagttgttatggcactttttatataaaaagtcgatgagtcagatcgccagtagctatggcatgagtcgtaagactttgtacattcatagattgcgtatctgtcgtaaatatggcttcaaacgctttttccatttgctatttatttaccaaagaagtcgccatatcttcgcatctaaaatttgccgtgtagacaaaaacgccgatcaggcttgaagcaaacaagatgaaaaagttaacgatgagagagtgtgaaagcatcaatcctactatgctgcttgccattaagatacttatctcggcgcttgacgaaaaaacaaaaataagactcagagagcatattgaaaaaactgaacaagaaatagcctcaagcatacatgatagcatcatgacagagacttttcttcagcaaatgaaagacattcgttacatcttaaatatagttccttgacggcgttcagaagcaagaacgcgttattatttaatgattaatagactaggtattagtatgaaaaagatcttagtatgtttcgccggcttggctttaaccgcatgtagcgctaattcgttgaattatggcgctgaacaggtacgggtgatgaccagcgagccaggtaaggaatgcagctacttaggggatatcacgggcagccaggggaatttctttaccggtggctggacttccaacagtaacctggaaacgggtgcccgtaacgatctgaaaaacaaagcttataaaatgggcggcaatacggtagtcctgttaacccagcgtgcaggccagacaggaagttcatggcacggttcgggctcaagcaaacaaacgaatgtcacgttaagcgggaacgtttatcgttgccctcgttaaccttattttgcaggcaatatatgcctgtttagcgcgcgcgccgcactggcgacgcgggcgctatttgggctaaccttgctttttctcgctgtattcccgccaaccgccgcctaatgctttatacagattaatgatattcagctgttgcatgagccgtgtgcgtaccaggcgctgttgcgcgccataaagcatacgatgggtatcaagcagcgtaaggtagtcatcgacgccttcctgaaaacggagtccggccagctcataggcgatttggctggcttcaaccgcgcgttgttctgattgcacctggtcattcagcgtacgctgtcccgccagaccatccgccacgtcgcgaaaggcttgctgaataacgttttcatacctggcgatttcaatctgtttttggacatgcgccctatccaggtcagcgcgtaatgcgccgccgtgaaagagaggcaaggtgatttgcggtagaaaacgccagcttcccgatcccggttcaaagagtccgctaagagacgcgctggccgttcccgccgtgcctgtcaggctgattgtcgggaagaaggcggcgcgcgctgcgcctattcgggcgtttgcgccacgcagcctgtactcggcggcgcgaatatccgggcggcgtaccagcagatctgacggtaatccgcctggcaatgtggtcgggatcgcgacttccgtaagcgtgaccgcctcgtttagtcgacgcgacagttcaggcgtgagcggctggcccaacagcaattccagcgcgttacgatcccgcgccaactgtcgcgtatacgccgcgcgattgatttcggcagaacgcagcgcgatctccgccatacgcagatcgagctgtgtggcgttgcctgtccgggcaagctgggttgtcaatgtgtatgaacttttttgcgcggccagcgtatcttcggttaagcgcagcagctcccggtcagcccgtagcgtcagccaggcgctggcgacttcggaaaccaggctcattcgcgccgcaatgtacgtctcatcaagcgccatataggcggctaatgcctggtcgctaaggcttcgcactcgcccccagagatccagttcccaggccgtcgtcgccccagccatctcgtagcgtcggttaatctcaggctcgtccgtgacgctgagatcggcgggagtgcgaccggcgtccatggcggtggcgatgccgagcgtcggcagcatctccgcgcgctgaatacggtataacgcccgggcggcttcaacattgagccctgccttgcgtaaatcccgattattgcgtaacgcgatcgcgatcagttcctgtagaagcggatcgtggaagaaatcacgccagccaatgtcagcggcatccggcgcgccagaaacggttgacgttgcgtagggatagaccatcgcagtcggcgatgcggggcgttcgtgcttcggcgccatcgtacagccagcaagcgtggtgacgaaagcaagcgtcgccagcgtggcggtctgccgatagcctgtaaaagtgatcttcattatgccattcccatcattatgcttgctgatcatgtgaatcaacgcggttctcacgctttaatgccatcctgcgaaccaccacgtaaaacacaggcgtcaataacaggccgaagagcgtgacgcccaacatgccggcaaacacggcgatgcccatcgcatgtcgcatttccgcgccggcacccgtcgcgagtaccagcggtactacgcctgcgataaaggcgaatgaggtcatcaggataggacgcagacgcaggcgggacgcttccagtacggcggtcagcgggtctgcgccgtcgtgttctttggcgcgggcaaactcgacaatcaaaatggcgttcttggccgccaggccgaccagcaccacgaaaccaatctgcgtaaagatattgttatctccgccagatacccacacgccgacaatggctgagagtaatgacataggcgcaataagcaggacggcgaagggcagcgaccaactgttgtactgcgccgccaggatcaggaaggccaacagcaccgccagcgcaaagatagcaagcgcagaattgccggcctgtttttcctgataaaccagatcggtccattcgaagaccatcccttccggtaacgtttcacgcacgatcttttcaatcgcgtccgtcgcctgtccggaggagaagcccggagccggtccaccgctaatatctaccgaggggaagccgttgtaatggatgattctgtccggccccgactggcgcataatcgtgacgaaagcgctaagcgggatcatctcgcccttcgcattgcggactttaagcaggccgatatcctcttgttgcatacggaatggcgcatcggcctgcgccatcacccgccaggtacggccaaatcggttgaaatcgttgacgtaaagcgagccgaggttaatttgcaacgtttcaaagatgtcggtgagcgatacccccattgatttcgcctttacccggtcgatatccacctgtaattgcggggcgtttgtctggaaactggccagcatattggccagttcgggcgtctgcatcgccttagacataatctcgctttgcacctttgtcatcgcttcaaatcccagttccgcacgatcttcaatctgcaatttaaagccgcccgtcgcgccaagccctggaaccggcggtggcgggaagatgccaataaatccgtcgggaatgtggctaaatttgtgcattagctttccggcgatagcgttagcggaaagcgaaggatcttcacgctcgtcaaagggtttcagcatggcgaacatcagcgccgaatttggcacatttaccgggccgttaaccgacagaccggggaagacgacgacgctttcaacgccgggttccgccagcgcgatagcggacatctgtttcacgaccgcctctgtgcgatccaacgatgcgccgcttgggagctgggcgatgccgacgagatagtatttatcctgcgcaggcacaaacccgttcggcacctgatggaagccaagccaggtcagccccacaaagccagcatagagcaccatcacaatgacgctgccgcgcacggcccgacggacggcgctaacatagcggttcgacgcgctgtcgaagaaacggttaaagcgatggaaaaaaccgccagtgaccgtgcccatcaaccgcgttagccagtcagccttcgcagtatcgtggtgcggtcttagcaaaatggcagccagcgcaggggagagcgtcagcgagttaatggccgaaaggatggtcgaaatagcgatggtcaacgcgaactgacgataaaactcaccctgcaggcccgccaggaatgcggaagggataaagaccgccgttagcaccgaggtaatagaaagaatgggaccagtgacttcatccatcgccttctttgccgcctctccggggcttttgccctgcgagatatgccgttccacgttttcgaccacaacgatggcgtcatcgacaacgatacctatcgacaggaccaaaccaaacagcgaaagcgtattcagcgaaaagccaaacaggtgcatcaaggcaaaggtgccgaccagcgaaacgggaaccgccaccagaggaataatggacgcccgccaggtttgcaggaacagcaccacgacaaggacgaccagcacgagggcttccagcaacgtaatcgccaccgattgtagcgatgcgcgcacgaagaccgtaggatcataggcaatccggtattcgatatcctgcgggaagttttgctgtaactcatccattttgccgcgaatcgcgttagaaacgtcaatcgcattggcgcccggactttgaataatctgtaacgctggcgccgcttcgccattcagtaaactgcgcagcgtataggcatctgcgcccagcgtgacgcgggcgacatcacgcagacgcgtcacctcgccgtcagcgccgatttttaccacaatctcgccgaactgttcttcgctggtcaggcggcccagcgtgtttaccgtcatctgaaaagctgcggaggcctccggctgttgcccgacggaaccggcggcgacctgtacgttttgttcccgcaacgccgtaacgatatcactggcggtaagaccgcggttggcgattttcgccgggtccagccagacgcgcatggcgtactcgcccgcgccccagacgagaacatcgccgacgccgggtaaacgggccagctcgtcgcgaacctgccggatggcgaagttagacaggtaaagcgagtcatagcgtttttgcggcgagacaagatggaccaccatcaacatatcgggggacgttttctccgttacaacgccaattcgctggacttcttcgggcaggcgaggcagcgcgcgggatacccggttttgcacctgaatttgcgccatatcaggatcggttccctgttcgaaggcgatagagataaccatgcgaccatcaatggccatctgggtattcatatacaacatgccgtcaacgccgttgatcacctgttccagcggcgcggctaccgtatcggcaatcacttgcgggttagcgccggggtagctggcgctaacctgtaccgtgggcggcgtaacggccggatattcactcagcggcagttttaaaaaggcgatagcgccagccagcagcattaacagcgacaggacgatggcgaagatgggtcgtgcaatgaaaaagtgggtgaatttcattggcgcaccgccttcggcgcactgtcgccgtccgctttagtcaatgtcgcggtctgtttgtcggtcacattctgtcgcatcggcaccagacgcggcgcaacggtcatgccaggacgcaccagccccttgaggatgattttttctcccggctgtactccctgtgtaacgacgcggagtccatcgaccatttgtcccagctcaaccggacgatactccacctgattctccttgccgacgatcagcacataatttttgccctgatcggcgctcaccgccatatcgtcaatcagcacggtttcccgcggctcgccgatgggcaaactgattcgggcaaacaggccgggagaaagcattccgttggggtcaggaatcacggcgcgcgcccggatagtgccggtgctgcggttcatctgattgcccataaagtcgagtacgccctgataaggcagcccgttatcggtggttaaccccatgttgactaccggtgaatttttgtcggagcgggtatgccgtaacgccttcagccaggtggcttcgtcaatatcgaaatacacatacatgggattgtgagacacgatagtcgtcaaaagcgtggcgttacccgctacgccgccgctgaccagattgccccgggtcaccagtatgcggtcaacgcgtccggcaatgggcgcggtaatacgggtccaggagagttcaaggcgcgctgcggcgacggcggctttggccgattgcatctgcgcctgtcgcgcattacgcgtggcggtgacatcgtcagcgtttttacgtgatacggcgccgctggcgaccagtcgttgaatgcgatcgaaatccgcctgcgcctggcgggccagtacttcagcctgacgtaattgcgcgacggcggtgtcgagggcgacctcgaacgggcgcggatcgatctggaacagcagttgtccgcggcttaccagacgtccttccggaacgctgacggcgtcaagggttcctcccacgcgcgaacgcagctccacggtctccggcgcggccagaaaaccggtgaattccgccgtaggcgtgagtgtacggctaagggctttagcaaccggtaccgacggtggaggcggcgcgctggccggggggccgacggcgttgtctttatcccatagtgcttcgccggccatgtaaatcacgcccccgatggcggcgatgacgccggctatcaacataattttgaatgttctacgcatgtcgtttccctctttaccgcagcgtgtcggccattccgcaacgctgccgcagaatttttggcaaaggctaggcgttacaacgaaggaaaggtcaagcgttcctggcgggtttttacgggacgtaggtcggcatcgtggcgtaaatgtctcgcatcatcctcttttatgagccatctcacattctcgccgaaccgtgcagcctgaatacgcttgaccttcccacaatggcaagctttaggctttctgataccgaatagtcaggatggggaagtcgtcatgagtcagtcagaaaatcgtcacgacacgataagcttgcttattgaaggtatgacctgcgcgtcgtgcgtcgctcgcgttgaaaaaggtattaaggctgtgcctggcgtaacggacgctacggtgaatctggcgacggagcgcgccaccgtccgcgggacggcgtcggcggaggcggtgatcgcggcgattgaaaaaacggggtatgaggcgcgaccgatagagacggcggggcagggcgaagacgactctgaagagaaaaaagaggccgagcgcgtcaggctgaagcgcgatctgattctcgccagcgtgctggcgctccccgtttttgtgcttgaaatgggctcgcaccttattcctggtatgcacgagtgggtgataaaaacgattggcctgcaacaaagctggtactggcaatttgcactgaccctgttggtgctgacgatccccggtcgccgtttttaccttaaagggttcccggcgctggcgcgtctggcgccggacatgaactcgctggtcgccgtgggaaccgcagcggcattcggctactcgctggtggcgacctttacgcccgacctgttgcctgaagggacggtaaacgtctattacgaggccgccgcagtgattgtcgcgcttattctgctggggcgctttctggaggcaagggcgaaggggcggacttccgaagcgattaaacgtctggtggggctacaggcgcgggtcgcgcatgtgttacgcgagggccgcatcgaggatatccctgtcgacgaggttgtgctgggcgactgtgtggaggttcggccaggcgagcggataccggttgacggcgaagtgaccgaaggccgcagcttcgttgacgagtcgatgattaccggcgaaccgataccggttgagaaatccgcaggaagcgcggtggtgggcggtaccgtaaaccaaaaaggcgcgctcacgctgcgggcgaccgccgtcggcggacagaccatgctggcgcaaatcattcgtctggtggaacaggcgcagggttcaaaactgccgattcaggccgtcgtggataaagtgacgctgtggtttgtcccgatggtaatgcttattgctgcgctgacctttgtggtatggctggcgtttgggccgtcgcctgcgctgactttcgctctgatcaatggcgttgcggttctgattatcgcctgtccttgcgcgatgggcctggcgacgccgacctctattatggtgggaaccggtcgtggggcggaaatgggcgtgctgttccgtaagggggaggcgttacagctactcaaagacgctaaggtggtggccgtagacaaaaccgggacgcttaccgaaggccgcccggtactgaccgatctcgacgtggccagcggctttgaacgccgtgaggtgctggcgaaagtcgcggcggtagaatcgcgttcagagcatccgattgcccgtgcgattgtcgtgtcggcagaagaggaagggatcgcgctaccaggcatgaacggcttcgaatcggtgaccgggatgggcgtatacgctaccgttgacggtacgcgtgttgacgtgggggctgatcgctatatgcgcgaaattggcgtggatattagcggcttcgccaccaccgccgaacggttagggcaggaagggaaatcgccgctctatgcggctattgacggtcaactggcggcgattatcgccgtggccgatccgatcaaacccagtacgcccgccgcaattaacgctttacatcagctcggcattaaggtcgccatgatcactggcgataatgcccgcacggcacaggctatcgccagacagttaggaattgatgatgtggttgccgaggtattgccagaagggaaagtcgaggcgatacggcgcctgaaagcggcgtatgggcaggtggcgtttgtcggcgatggcatcaacgatgcgccagcgctggcggagtccgacgtggggctggcgattggcaccggcaccgatgtggcggtggaatccgccgacgtcgtactaatgtccggcaacctgcaaggcgtgccgaatgctatcgcgctgtctaaagcgaccatccgcaatatccaccagaatctgttctgggcctttgcttacaatacggcgctgattcctgtcgcggcaggcgcgctatttccggtctggggcatattattgtcaccggtattcgccgcaggggcgatggcgatgtcgagcgtgttcgtgctgggcaacgctttgcggctgcgccgtttccgggcgccgatggcaaccccatccgacacatccacgacccgaggaggagcgtcatgaacatcggtaaagcagctaaagcatcgaaagtctcggccaaaatgattcgctactatgaacagattggtctgattcccgcggcaagtcggacggattccggctatcgggcctatacccaggctgatgttaatcaattgcattttatacgccgcgcgcgcgacctcggtttttcagttgctgaaatcagcgacttactgaatctttggaataaccagtcgcggcaaagcgctgacgtcaaacgcctggcgcagacgcacattgatgaactggacagacgtatccagaacatgcagcacatggcgcaaaccctcaaagcgctgattcactgctgcgccggcgacgcgctgccagattgtcccattctgcatacgcttggacaacctgacgatagcgagccggaggcgcgtaccggagcggtattgcgccgtcctcgtcgccacggactggcaaagcgtctgtaagtcctgagattacgcttgaccttccaacactggcaaggcccagactggcaacagttcccacacaaaaggagttcaccatgcagttccatattgatgacatgacctgcggcggctgcgccagtacggtaaaaaagacgattctgactctcgatgctaatgcgacggtgagaaccgacccggcgacgcgtctggttgacgttgaaacgtcgctatccgcggagcagattgccgccgccctgcaaaaggccggtttcccgccgcgcgagaggtaatcgtcaatggcgatcggtctggcgacaggccggtcgcgatacgctagccacgcttcgctttcctttgcatgagataatccccataaaaaatgtgacaaatcatgtgccagtaagctttgttaataatatgtaatgatttgtctatttttgctaacattttacctgctatatacaaaaagataacaaataagtagcgcaacgctaccttgttacgtcgctttgacgacgggagcgctccagcgtttcgccgcttcaaagcttgatgttattttttgatgcaggacactacctatgtacacccccctgaactggacgacgacacaacgacatgtggcgtttgccagctttaccagttggatgctggatgcgtttgatttctttatccttgtctttgtacttagcgatctcgccgaatggtttcacgcttccgtatcggacgtttccattgcgattatgctgaccctggcggtacgtcccattggcgcgctgctatttggccgaatggcggaaaagtacggacgtcgaccgatactgatgctcaatattctgttctttacggtgtttgaactgctttccgcctggtcgcccaccttcatggcatttctgatttttagggtcatgtacggcgtggcgatgggcgggatatggggcgtcgcgtcatcactggcgatggaaaccattcccgatcgttcgcgtggcctgatgtcgggcatttttcaggcgggctatccctgcggctatctgttcgcctcggttatttttggcctcttctacagtatggtaggctggcgcggtatgttcctgattggcgccctgcctgttgtcttactgccttatatctggtttaaagtgccggaatcccccgtctggctggcggccagagcgcgtaaagggaataccgcgctgcttcctgttctgcgcaaacagtggaagttgtgtctgtatctggtgctggtcatggcgttctttaactttttcagtcacggcacgcaggatctctatcctaccttcctgaagatgcagcatggttttgatccgcatctgatcagtatcattgcgattttttataacattgccgccatgctcggcggtattttctacggtacgctatcggaacgtattgggcgtaaaaaagcgatcatgatcgccgcctttcttgcgcttccggtactcccgctatgggcattttccagcggatcattcacgattggcctgggcgcgttcctgatgcagtttatggtgcagggcgcctggggagtcgtgccgacctggctgaacgagctggttccggcgaatgcgcgcgccgtgctgccagggtttgtttaccaactcggtaatttactggcgtcggttaatgcgacgttacaggcccgcatcgcggaaacgcatggcggaaattacgggttggcaatggcgatcgtggctggcgcggtggctattttaatctgtgtatttgtggcatttggtcgcgagacccggggagtcgtcatctccggtacagatagcgacgccctcccggagtcggccatcggtcatcgcacgtaaacactacgctcctggcgcatactgtcgccgggagcgctccttcctcctgtggtttttacgccctttcaacgaacaacaaaggttaatgatggcatctgcctttcgtgaccattacaatcatcgcttacttttttctttataagaaattgattgttggaccttaaaattgtcaacggagcgaagatatcatgttgaaagataaccaaaaacacaacgagtctgttgccccgaatagcgcctttctgtctgagttacaacgtgcattaccggaattttttaccgccgatcgctataacgagcagggcgaactgatcgcgaaaggcggatttgatctcgccagatttgagcgcgcgctgaaagcgcgtaatattgatgagctgactagcggttatcagattgattttattggtaaagattacgcaaaaaaacaggcgggtgaaaaatccgttaccgttatcgttcctgacgtggaacacaatactctggcagaaaataaaaacagccataatctttttctgaccggagataatctggatgtgttacgccatctgcaaaataattacgccgataccgtcgatatgatctatatcgatcccccttataacaccggatcggacgggtttgtctatcccgatcattttgaatatagcgatcgggcgttgcaggatatgtttggtcttaatgatactgaactggcacgtttaaaatccattcagggtaaatcgacgcactccgcgtggttatctttcatgtatccgcgtcttttcctggccaggaagctcctgaaagataccggatttatttttatctctatcgacgataatgagtacgccaatcttaaattaatgatggatgagatttttggcgaaggcggatttgtcaccaatgtgatgtggaagcgcaaaaaagagatttctaacgactctgataacgtttccatccagggggaatacattcttgtttacgccaaaaccggtcagggcgctttacgtttagaaccgctttctaaagagtatattcagaaatcctataaagaaccgaccgaacagtttccagaagggaaatggcgaccggtgccgttaacggtgtcaaaagggctgagcggcggcggctatacctataaaattaccacgccgaacggtacggtacacgaaagactatgggcttatcctgaagccagttaccaaaaactggtggccgataatctggtctattttggcaaagataacggcggtattccccagagagtcatgtacgcgcaccacagtaaagggcagccaacgaccaattactgggataacgtagcgtcgaataaagaggggaaaaaggagattctggatctcttcggcgacaacgtttttgatacgccgaaaccgaccgcattattgaagaaaatcatcaagctcgctatcgataaagacggcgtcgttctggacttttttgccggttccggcaccacggcccatgcggtgatggcgctgaatgaagaagatggggggcagcgcacgtttattctgtgtactatcgatcaggcattaagcaataacactatcgcgaaaaaagcaggttataacactattgatgaaatcagccgcgagcgaattacacgcgttgcggcgaagatccgcgccaacaatcccgcgaccaatagcgatctcggttttaaacattatcgttttgccactccgccacagcagacgctggacgatctggatagcttcgatattgctaccggccattttatcaataccagcggtcaactggccgctttcaccgagtcaggatttaccgacatgatcaatcctttttccgccagaggattgggcgtgccgggcggcgcaagcggcgaagagaccttattaacgacatggctggtcgccgatggttataaaatggatattgacgtacagaccattgatttttccggctattgcgccaggtatgttgataatacgcgcctgtatctgattgatgaacgatggggaacagagcagacccgcgatcttctcaactacattggtacgcaccagcttccggttcagaccattgtcatttacggctactctttcgaccttgaatccattcgtgaactggaaatcggcttaaaacagcttgatcaaaaagtgaacctggtgaagcgttattaagaggggatgatgatgaatattttactggaagaacttccccatcaggaacaggcgttagcggcgattctggcgagtttcaccggtatcgatcacgcgcaggccgatcataatcactatgctaatccgctgattaaggaacgttacgacgataaggccaatattgacgttaaaatggagaccgggacgggcaaaacctatgtctatacccggttgatgtatgaactgcatcagaagtatggcctcttcaaatttgtgctggtggtgccgacgccagccattaaagaaggcgcgcggaactttatcaccagcgattacgccagacagcatttttcacagttctacgaaaatacgcggatggaactttgcaccatcaacgccggtgattttaaagtaaagtcggggcgtaaaaattttccggcccagttattaagttttactgatgccagccgtcgtgatagccatacgattcaggttttgctgatcaatgcgcaaatgctcaattccgccagtatgacgcgagacgattacgatcaaacgctactgggcgggctgacgtcgcctgttaaagggctgcaaatgacgcgaccggtggtcattattgatgaaccgcatcgttttgcgcgagataacaaattttatcgagcgattcaggccattcagccgcaaatgatcgtccgctttggcgctaccttcccggatattgtcgaaggtaagggtaaaaataaatgtgtacgtaaagattactatcgccggcaaccgcagtttgatctcaacgcggtggacagttttaacgatggtttggtgaaaggtattgatatttattacccgaatctccccgaagaacaggccaacaatcgttatatcgttgacagcgtcacggcaaagaaattaatcctccgacgggggagcaaaattgccgaggttggcgtgggcgaaaatctcgccgatgtcgatgcaggatttgaaggcagtatcgaatatgccggcagtaaaatgttgtcgaacgatctggagctggaggcagggatggcgctggtgccaggaacctttggcgcgagctaccaggaactgattattcaggacgctatcgataagcattttgacactgagcaggcaaatttcttacgcagcaatgagccagaaaataatgccccgcgtattaagaccttaagccttttctttattgacagtattaaaagctatcgtgatgacgaaggctggttgaaagtcacttttgagcgtttgctgaaaaagaaactgacgcaactgattgacgattatcagcgcaagaccctgccgcgagaagtggagtatctgtcgtttctgcaggccacgctcgccagcctgcactcggataaccaaaacgtccacgctggttactttggcgaagaccgcggaagcggcgatgaggcgatccaggctgaggtagatgatattctgaaaaataaagagaagttgctcagtttttcagaccatcacggcaactgggaaacgcgccgctttctgttttcaaaatggacgcttcgcgaaggctgggataacccgaatgtttttgtcattgctaaattacgttcttccggtagcgagtcgagcaaaattcaggaagtggggcgcggcctgcggctaccggtagatgaaaacggccatcgcgttcatcaggaagagtggccgtcccgactgtcgtttctgattggttatgatgaaaaagcgtttgccagtatgctggttgatgagattaatcgcgacagcaaagttcagcttaacgagcagaaactggatgaggcgatgatcacactcatcgtcaccgagcggcaaaaagtcgatcctgcgtttacggagcttcgtttgctggaagatctggatgataaaaaactgatcaaccggagtaatgagtttaaacccagcgtcacgcttaacggggaaaccaaaagtggttttgcgtggctactggagttctaccctgagctgacgcaggcgcgggtgcgagcggatcgcattcgtgacaataagcccgcctcccgactgcgagtcaggttacgcaaagagaattgggaacaacttagcagtatctgggagcagttttcccgccgttatatgctgcaattcgagcgtagcggcgcgtctctggaacagattgccgccgaggtgctgcgcgatccggcgctgtatatacgccagaagccaagccaggtgcaacaacggctggtatcgaatgaagataatggccgttttgaagtggcgcagcgggaaggcgaattagccgccagcgaatttatggtgggcatgaaatatggccattttcttaagcaactggcgttacgcaccagtctgccggttaacgtcctgcacccggtgttaatggcgatgctgcgtgatgttttgcacggagattcacgctatttaagcgagatctcgttggacaatatgacccgcgcattacagacgcggattaatgcgcattttgcgcagcgccacgattatctgcctctcgattttcaggcttcaacgtcggtatttgattccacggcacggcagttcagagaggagattagcgctgaaattgtggggaaaaatgtggatgagaatgcgatagacgatccccgttctctctatcaaataccgccgttgcgttatgacagcgtcgatccagaattgccgctattaaaatacgattatccgcaacaggtttctgtgtttggcaaactgcctaagcgggccattcagatccccaaatatacggggggctctactacgccggattttgtgtaccgtattgagcgtcaggacgccgacagtgtttatttactggttgaaactaaagcagaaaatatgcgcgtaggcgatcaggttattcttgatgcgcaacgtaaattcttcgatatgctgcgtcggcaaaatatcaatgtcgagtttgcggaagcgaccagcgcgccggcggtattttctacgatcaatggcttgattgaggggaaggcaaactaacgggtttgaatggaccttaacggttatctttttgatagaccatataaaatggccgccgcgcagcgagcgttgcggtcattctccctgtgctaatcccccgtcccgtaaaccgcgttgacttgaaggttatcgttttacgtctattcttaactttcagctaagcgtattttgctgaaattgcaaatagtcttgaggacgctgtttttttgttttgccgttatttttataacggccaggtagatattgccaagtgaatgtaactaagggagacatgttatgctaaatagatactaccgtttcgctgtcgaaaaagacgacccctccgaagcgccagagtcgggcgataagcctgacagccagccgcaaaaaaaatcgtaatttatctggatattccccgacgtttttacgtttggggaaaataaccgtttcgtttcaacctggttgcgaacagtgaatattttacacgaagtgactatatataaacgggagggaacatggagtttgatgccttctttttagcgagactccagtttgcctttaccgtctcttttcatattattttccccgcgattacgattggcttagccagttacctggtggtactggaaggtttatggctaaaaacgcgtaatcctgtctggcgctcgctctatcagttctggctcaaaatttttgccgtcaacttcgggatgggcgtggtctccggtctggtcatggcttaccagttcggaacgaactggagcggtttctcccagttcgccggcagtatcaccgggcctttattaacctatgaagtgctcaccgcattcttcctggaagcgggattcttaggcgtgatgctttttggctggaacaaagtcgggccgggcctgcatttcttgtctacctgtatggtggcgttgggtacgttaatgtcgacgttctggattctggcgtctaatagctggatgcataccccgcagggatttgaaattcacaacggtcaggtggtcccggtggactggttcgcggtgattttcaacccgtcgttcccgtatcgcctgttgcatatgtccgttgcggcgtttttaagtagcgcgatgtttgtcggcgcgtccgctgcctggcatttactgaaaggtaacgatacgccggctatccgccgtatgttctcgatggcgttatggatggcggtcgtggtggcgcccgttcaggcattgattggcgatatgcacggccttaacaccctgaagcatcagccggtcaaaatcgccgcgattgaggggcactgggaaaatacgcccggcgagccaacgccgcttacgctggtaggctggccggatatggaggcggaacggacccgctatgcgcttgagatcccggcgttgggcagtctgatcctgacgcatagcctggacaaacaggtgcctgcgctaaaagattatcccaaagaggatcgccccaactctaccgtggtgttctggtctttccgtctgatggtgggcatgggcgtactgatgatcttcctggggctggccagcctgtggctacgctaccgacgccgactgtatcattcgcggccctttatgcactttgcgctgtggatggggccgtccgggcttatcgccatccttgccggatgggtgacgactgaagtaggacgtcagccgtgggtggtctatggcctgctgcgaacgcgtgatgcggtttccgcgcacagcaccttgcagatgagcatcagtttgctggccttctttgtggtctattccctggtctttggggttggctatatttatatgattcgtcttatccagaaagggccgcagccggcggagacaccgaccgctgaaaccgatggcagacccgcgcgtcctatctctgccgtgggagaatcgcttgagcaggagaaacgcgaatgaccatcgatcttccggttatctggtttgctattatcgtgttcgccacgctgatgtatatcgtaatggatgggttcgatctgggcgtcggtatcctgtttccgtttattcgcgataaacacgatcgcgatgttatggtgaactcggtcgcgccggtatgggacgggaacgaaacctggctggtgctgggcggggccgggctttttggcgcgttcccgttggcttatgccgtcatcaccgacgcgctgactatcccgctggtggttatgctgcttggtcttatctttcgcggcgtcgcttttgaattccgttttaaagccaccgagtcgcatcgcgcgttctgggataaatcctttatcgtcgggtcaatcctggcgacctttgcccagggggttgtggtgggcgcggtggtgagcggttttcaggtggaagggcgaacctttagcggttcgcagcttgactggctgacgccgtttaatctgttctgcggtgtcggtctggttgtcacctacgcgctgctgggcgctacctggctgattatgaaaagcgaagatccgctgcatagccggatgtgcgcgctgtcgcgcccgttgttgatcgtcttgttgttggtgatgggaggcgtcagcgtgtggacgccgctcacccacgacgacatcgccgagcgctggttcacgctgcccaatttatactacttcctgccggtgcctgtgctggtgttggcttttagcatctggctatggcgcagcgtgaaaaaaccagaatcccatgcgcgtccatttattctcacgctagggctgatttttctggggttcagcgggttaggcatcagtatttggccgaatattattccaccggatatttcgctgtatgccgccgccgcgccgccgcaaagtcaaagctttatgctggttggggcgctgataatcatcccgattattctggcttataccttctggagctactacgtcttccgtggaaaagtgcgacatggagagggatatcactgatggttaaagtgaaaaaatggtcgcggcgagtcgtatggatggtcgcgatatggtgcgccagcgtgcttctgctggcgggcgtcggaatgttattcagactgctcatgacctccgcaggatttcgctcctgactgataccccccggacgcgctttcatctctcgcgaaagcgcgtttttatcgacagatcggcgtttatcgatcacctttgctcgccttatctctcccctcaatagcggttgataattattctcatctttattgtcgttcccgggccgcagtgatatggttacacagtggctaacgctctggtataacgcagataaacggtattgatgatgtctccgatctcctgtcactcttccgccgccccggcgatgaaaaagatcttttccgtcagcgacttcatcgcgtttggcgagcgttatggcattgattaccgcttccctgcgttaccgcagtatacgcagagtagtcccgtacttcatggcgatatcgaagagatagcgcttcccggcgggatttgcattacacgctcggatgttcacgtgttacaaccttatgaaaccacctctcgccatagcagtccgctgtatatgctggtggtgttggaaggtaacgtcgcgctggctgtcaatgagcagacctttttgttgagcgcggggatggcgttttgctcgcaactgagtgagcagcagacgatacgcgcccatcacggcgcagacagtaaattgcgcaccttatcgctgggaatgtacccggacggcggatggcgggagcgtttgcctgtctcgctggcagacgagtgggaaaatagcgcaacctcggcgagggtctggcaggtgccggagtttctgctttcggggctacgttatgcgcagcagcccggacctcatgcggcgtcacgccagttaatgctggaaggcatcatgctgcaattgctgggctatgcgctaaatctatgtcagcccgcaacgcaaaaacgcgggcttcccgtcaccggtgaatatcagcggctggagctcattcggcgtttactggagcagacgccggaaaaagcctacacgctgaacgaactggcgcgtcgggcggcaatgagtccaagtagcctgcggtgcaagtttcgccatgcctatgggtgtaccgtgtttgattatctgcgcgattgccgcctggcgcgcgcgcgtcgttatctgatggagggatacagcgtgcagcaggccgcctggatgtcaggctatcaacatgccactaactttgcgacggcatttcgtcggcgttatggctgctcgcccggcgagctgcgtgacgcgtctctgacggcgtcccgccactgtgcgtaacgcgccccgccagaacggtaatatccgccgctaacccggttttctgccgctttgggtgattttttatcattgcgcataggcaatctggcgttacgcatagtggtccgttatctctaaaaggtaataattcttatttacaataaagatgcctttggagatgttcatgtttgcgacaacgcgtatggcgctattgataggcggagctatcggcggcgcgacttttcctctttttgcccaggaaaccacaaaaaatgataccgtcattgtcacctcgcccgttcagagtggcgcgaccaagctggcgacgccagatattgaaacgccgcagtcggtatccattattacccgccagcagtttgaagagcagggcgcaaccagcgtgcgtcaggcggtcagctacaccccaggcgtatacagtaaccagataggcgcctctaaccgctttgattacatcgtattgcgtggtttttcggacggtagtctggataacgtctatctcgacgggttaaaaatgatgggcgacaccaattcgcacagttcgttggtggttgacccctggtttctggaagatatcgaggtggtacgcggcccggcgtccgttctgtatggtcgttcatcgccaggcggcattgtcgcgttgacgtcgcgaaaaccggcgtttgatgtcgggggagaagtgaagctgtttgccggcaatcacaaccagcgcggggcggcttttgatgtgaccggcccactggatgacaatgaacgtgtggcggcgcgtcttagcggtatgacacgttacgccgattcgcagtttacccccttgaaagaggaacgttatgcgctgatgccgagcctgacctggcgaattaccgatcggacgcgtcttgatcttatggcctatctgcaccgtgatccggaaggcggtagccactccggactgccttatcaaggcacggttgtaccttataacggcagaaaaatttctaacactttctttgaaggtgaagatgactacgacaaatacgatcgccgtgaaaatatggtgggttataacattgagcatctgttcgataacggctggtcggtacggcaaaaattgcgttatttgcataccaaagtgacgttgaatcaggtctatgccgcaggttggttgaatgaaacggcgctgaatcgcggctattccggctccggggagaaaatgtcggctatcgcgctggataatcagctcgacggcagcgtggataccggggcgattaatcatcgtctgctggtggggatcgattatcaggatcgcagtaatcatactactggctattatggcgcgtttccgccgattgacgctttcaaccctgtttatggcgctcagccggattacattacgttgtatagccgtgaaaaacataagctgcggcagaccggatactatttacaggatcagatgtcatgggatcgctggcgctttacgttgggcggtcgttacgatcgggtcagcgtgtctaacatcgacaaacttcatgattcacgcagcgatctcgataaaaacaacgtcagcacccgtgccgcgttgctttatctgttcgacaatggcgtcgccccctatctcagttattctaccgcgtttacgccgaccagcttcgccgacgaaaacggcaatgtgctggaaccgatgaaaggcaagcagtgggaggcgggggtaaaatacgaaccgctgggggggaatagccagtttagcgccgccgtgtatcgtattaaccagacaaatatcgcgaccaaagaagaacctaccgatccgtaccgctcgattggtgaaattgagtctaaaggggtggaactggaggccattagccatttgtcggatagcgtccgtttgcaggcggcgtatacctatactgatatccgttataagaaaagtagcccgcaagagcagggtaagcgcgcggtttatgctccacggaaccaggccagcgcctggctaagctacgatgtgaaaagcggtctgttagaggggctgactttgggctccggcatccggtacgtcaacggcgtgaccagcgatcgcctgaatacccacacgttgccgtcctatacattggtcgatatggtggtagggtatgatttatccagcattgggttaaatggcttgagcgcccagctcaacgtaaataacctgacggacaaacgctatgtcgctgcctgtaattcgctctcttattgttattttggcgccgagcgtagcattgtaggcagcgtgtcatgggcgttttgataacgcttatcgtccggtagcaaaggctaccgggcaaacattagcggtgcgtcacgccttcatagagaagtctgagcgcaaacatcccgataatggcgccgataacacggctggcaatgcgctgtatacgcccataagcgcggcggactgcggggagcgaaaaggcctggctgagaaaaatacgccagataacggatgacagcacaattccggcccaggccattaaccttgcccatgtgggcgtttctgcgctaagcgttacggaaaaaatactgataaaaaacagtacggtttgcggattggataaatcggtcattaatccccggcgaaagaaaatcgtccacggggcggcaatcggcgtctggagcgtgctcatttgcggcgtcgcctggtggcgaatactgttccaggcgaaccataataaataggcgccgccgacaattttgataagagaaaataccgcttcgcattgcgtaatgagcgtcgccagaccgaaaagccccagcccggaataaaaggcgtctcccgtggcgacgcccaggccggtgatgactcccgcccggcgtcctgatgcgaggctggtttgcaccaccacaaacagattcgcgccgggattaaaaaaggttaacacaaacagactgacggtaagcacaacggcatgaaacggctccataggcaactcttctcttagcctcaagaaataacgttcatcttattaatagtcaaaccagatgattgcgagtgagatcacaaagcaggggcgttttaatccgcgtcgttatgccgactgagcgggggctgactggatttttccagcaatctacactacttatttaatcagtccgaacggcctttttgttctgataaagcgatgatggcgtaataataaaacgagggttttgctatgaaaactggctacaaggttatgcttggcgcattagcgtttgtcgtgacaaacgtttatgccgcagaaatcatgaaaaaaacggactttgataaagtcgcctccgaatacacgaaaattggcacgatttccaccaccggggaaatgtcgccgctggacgccagagaagatttaatcaaaaaggcggatgaaaaaggggcggatgtggtggtgctgacgtccgggcagacagaaaataaaattcatggtacggctgatatttataaaaagaaataaaagcgttgcatcataaaaatacccgcctgggtttccggcgggtatttttattcctggcaaccgtcatccgttttgccggatgacggcctgcagtaaacgtagcgccatcaggcattcaggacgctgtcatttgtcttaattatccgactggtctttggcacctgcttttaaacgacgccacagagtggtgcggctaatccccagataacgcgccgccgcggtcttatcgcccttaaagcgcgccagtacatcctgtaacgtgtgcgcatccatggttgaaggcgtcagttctgctgtgttcaccataagctcaggtaataactgccgcataaattgcctgtccagcgttggcgcgggatcgacgcttaaaaaaagcgccaggcgctccatcatattacgcagttcgcgaatattaccgggccagcgccaggccagcaaaagcggctgacactgtgtcaatccatgacgtatcgattcggtaaacggaatttccattgccgccagcgactgttttaaaaagctttccgccagcggtaaaatatcagcctgccgctcgcgcaaaggaggaagcgtcagacgcagaatactcaggcgataaaagagatcggggcgaaaacgtccttgcattatctcccgatccagatcgcaatgcgtagcgctgatcacccggacatccaccgggatcggctggtgtccgccgacgcgagtgacggctttttcctccagtacgcgcaaaagtcgggtttgtaacggcaagggcatttcgccgatttcatccagaagcagcgtgccgccgtgtgcgatttcaaacagccccgcccggcctcctcgtcgtgaaccggtaaacgcaccctcttcataaccaaacagttccgcttccagcaacgactcggtaatcgcgccgcaattgacggcgacaaagggaggggatggcttattctgacggtgaggctggcggtgaaaaaacgtctggtgaatcgcctgcgccgccagctcttttccggtccctgtttccccctgaatcagcactgccgcacgggagcgggcatagagcgtaatcgtctggcggagctgctccatttgcggcgactggccgcgtatatcgcccagttcataccgggtttgtaatcccttgccggatgagtaatccacgcgctggcgccgtgtcagacgggtcatatccagcgcatcatgaaaagcctgacgaacggtcgccgcggaataaataaagatggcggtcattcccgcttcttccgccagatcggtaattaatcccgcgccgacgacggcctcaataccgttggccttaagttcgttaatttgcccgcgcgcgtcctcttcggtgacatagcttcgctgttcaagacggaggtgaaacgttttctgaaaggcaagtaaagccggaatggtctcctgataggtcacgataccgatagacgaggtgagctttcccgctttcgccagcgcctgtaatacatcgaatccgctgggcttgatgaggatcaccggtattgacaggcggctttttaaataggccccattcgaacccgccgcgataatcgcgtcgcagcgctcggtcgccagttttttgcgaatgtaggtcaccgccttttcaaagccgagttgaataggcgtgatggtcgccagatgatcgaattccagactgatatcccgaaacagttcgaacagacgcgttacggagaccgtccagatcaccggtttatcgctattatcgcgcggagcgctgtgagcagtcgtcatcgcagtaggctcatctttaaggggcgattttttgttttaaacgtgtttcataaatgttgcaatgaaacggggtgattcgtttcatgaaacgttagctgacacgtttttcttttcccttaatcgcgcttattcataacaggcattactgtaattacctgtttttaaatctcattgtatttaattttctcgctgcctctttgcctggcatagcctttgctttggtaaatacatcttgaataacaatttactaacatgaggacgagatatgtctttacattcgccggggcaggcatttcgcgccgcgctctctaaagagaatccattacaaattgtcggcgcgatcaatgccaaccatgctctgttggcccaacgggccgggtatcaggctatctatctttctggcggcggcgtagcggcgggctcgctcggactgccggatctggggatttctacgctggatgatgtgttaaccgatatccggcgcatcacggatgtttgcccgctgccgctgttggtggatgcggatattggctttggctcctccgcctttaatgtcgcgcggacggtaaagtccatagccaaagcgggcgccgccgcgctgcatattgaagaccaggttggcgctaagcgctgtggacaccgtccaaacaaagcgatcgtctcgaaagaggagatggtagaccgaattcgggcggcagtggatgcgcgcaccgatccgaactttgtgatcatggcgcgtaccgatgcgctggcggtggaagggctggaggcggctctcgatcgtgcgcaggcttacgtggacgcgggggctgacatgctgttcccggaggcgatcaccgaactgtcgatgtaccgccggttcgccgacgtggcgcaggtgccgatcctcgccaacatcactgagtttggcgcgacgccgctgtttacgaccgacgagttgcgcagcgcaaacgtggcgatggcgctctatccgctgtcggcgtttcgcgccatgaaccgcgccgcagaaaaagtctataccgtgctgcgccaggaagggacgcaaaagaacgtgatcgacatcatgcagacccgcaacgagctgtacgaaagcatcaattactaccagttcgaagagaagctggacgcgctgtacaggaataaaaaatcgtagcctgtaggcctgataaggcgaagccgccatcaggcaatgccggatggcactacgtttatcccgcctacggtacggcctacacgcctcaataccctacacattacaataatgacgaggacaatatgacagacacgacgatcctgcaaaacaacacgcatgtcattaagcctaaaaaatcggtcgcgctttccggcgtacctgccggaaataccgctctgtgtaccgtgggaaaaagcggtaacgatctgcactatcgcggttacgacattctcgatctggcggagcactgcgaatttgaagaagtcgcgcatttactgatccacggaaaattaccgacccgcgacgagctgaacgcgtataaaagcaagttaaaagcgctgcgcggattacccgccaatgtccgtaccgttctggaagcgttaccggcggcctcgcacccgatggatgtgatgcgtaccggcgtttccgcgctgggctgcaccctgccggaaaaagagggacataccgtctccggcgcgcgcgatattgccgataagctgttggcctcgctcagctctatccttctttactggtatcactacagccacaacggcgaacgtattcagccggaaaccgacgatgattccatcggcggccatttcctgcatctgctgcacggtgaaaagccaacccaaagctgggaaaaggcgatgcatatttcgctggtgctgtatgccgagcatgagttcaacgcctcgacgtttaccagccgggtgattgccgggaccggctcggatgtctactccgcgattatcggcgcgattggcgcgctgcgcggcccgaaacacggcggggcgaatgaggtgtcgctggaaattcaacagcgttatgaaacgccggacgaggcagaggcggatatccgtaaacgcgtggaaaacaaagaggtggtgattggctttggacatccggtttacaccatcgccgacccgcgccatcaggtgatcaaacgggtggcgaaacagctttcagaagaaggcggctcgctgaagatgtaccacatcgccgaccgtctggaaacggtgatgtgggagaccaaaaagatgttcccgaatctcgactggttttcggcggtctcctacaacatgatgggcgtccctaccgaaatgttcaccccgctgtttgtcatcgcccgcgttaccggctgggcggcgcacattattgaacagcgtcaggacaacaaaattattcgtccttccgccaattataccggcccggacgatcgccagtttgtgccgatcgaaaagcgttgctaattaaaacctctaaatataaaaacaggagttgtaccctatgtccgcacatatttcgaacatccgcccagactttgaccgtgaaatcgttgatatcgttgattacgtgatgaattacgagatcacctcaaaggtggcgtacgacaccgcgcattattgcctgctcgacacgctcggctgtggtctggaagcgctggaatacccggcctgtaaaaaattgcttgggccgatcgtgccaggcacggtggtgcccaacggcgcacgcgtgccgggcacccagttccagctcgatccggtacaggcagcctttaacattggcgcgatgatccgctggctcgattttaatgatacctggcttgccgccgagtggggccatccttctgataacctgggcggtattctggcgattgcggattggctgtcacgcaacgccgtcgccgccggcaaagcgccgctgaccatgaaacaggtattgagcgggatgatcaaagcccatgaaattcagggttgcatcgcgctggaaaacgccttcaaccgtgtcggacttgaccatgtgttgctggtgaaagtggcctcgacggcggtggtcgctgaaatgctggggctgacgcgcgatgagatccttaacgcggtatcgctggcgtgggtggatgggcagtcgttgcgcacttatcgtcatgcgccgaataccggtacgcgcaaatcctgggcggcgggcgacgctacctcacgcgcggtacgtctggcgctgatggcgaaaaccggcgagatgggctatccctcggcgctcaccgccaaaacctggggcttctacgacgtttcattcaaaggtgaaacgttccgtttccagcgcccttacggctcctacgtgatggaaaacgtgctatttaaaatttctttcccggcagaattccactcgcaaaccgccgtcgaagcggtgatgacgctgtatgagcagatgcaggccgcgggtaaaacggcagcggatatcgagaaagtgaccatccgtacccacgaagcctgtcttcgcattatcgataaaaaaggcccgctcaataacccggcggaccgcgatcactgtatccagtatatggtcgccgtgccgctgctgttcggacggttaaccgcggcggattatgaagacgaggtggcgcaggacaagcgtattgacgccctgcgcgagaaaatcgtgtgttatgaggacccggcttttaccgccgactatcacgacccggaaaaacgagctatcggcaatgcgatcaccgtggagtttactgatggctcacgctttggcgaggttgtcgtggagtatccgattggtcatgcgcgtcgccgcgccgacggtattccgaagcttatcgaaaaatttaaaattaacctggctcgtcagttcccgactcgccagcagcaacgcattctggatgtctccctggacagagcccgcctggagcagatgccggttaacgaatacctcgatttatatgtcatctgagccagccagcagtaaggcgtaagttcaacaggagagcgtgatgtcttttagcgaattttatcagcgttccattaacgaaccggaggcgttctgggccgagcaggcccgacgtatcgactggcgacagccgtttacgcagacgctggatcatagccgtccaccgtttgcccgctggttttgcggcggcaccactaacttatgtcataacgccgttgaccgctggctggataaacagccggaggcgctggcgctgattgccgtctcatcagagaccgatgaagagcgcacatttaccttcagccagttgcatgatgaagtcaacgctgtggccgctatgctgctgtcgctgggcgtgcagcgtggcgatcgcgtattggtctatatgccgatgattgccgaagcgcagataaccctgctggcctgtgcgcgcattggcgcgatccattcggtggtctttggcggttttgcctcgcacagcgtggcggcgcggattgacgatgccagaccggcgctgattgtgtcggcggatgccggagcgcggggcggtaaaatcctgccgtataaaaagctgcttgatgacgctattgcgcaggcgcagcatcagccgaaacacgttctgctggtggacagagggctggcgaaaatggcgtgggtggatgggcgcgatctggattttgccacgttgcgccagcagcatctcggcgcgagcgtgccggtggcgtggctggaatccaatgaaacctcgtgcattctttacacctccggcactaccggcaaaccgaaaggcgtccagcgcgacgtcggcggttatgcggtggcgctggcaacctcgatggacaccatttttggcggcaaggcgggcggcgtattcttttgcgcatcggatatcggctgggtcgtcggccactcctatatcgtttacgcgccgctgctggcaggcatggcgactattgtttacgaaggactgccgacgtacccggactgcggggtctggtggaaaattgtcgagaaataccaggttaaccggatgttttccgccccgaccgcgattcgcgtgctgaaaaaattcccgacggcgcaaatccgcaatcacgatctctcctcgctggaggcgctttatctggccggtgagccgctggacgagccgacggccagttgggtgacggagacgctgggcgtaccggtcatcgacaattattggcagacggagtccggctggccgatcatggcgctggcccgcgcgctggacgacaggccgtcgcgtctgggaagtcccggcgtgccgatgtacggttataacgtccagctactcaatgaagtcaccggcgagccctgcggcataaatgaaaaaggcatgctggtgatcgaagggccgctgccgccgggctgtattcagactatttggggcgacgatgcgcgttttgtgaagacttactggtcgctgtttacccgtcaggtttatgccaccttcgactggggaatccgcgacgccgaggggtattactttattctgggccgtaccgatgatgtgattaatattgcgggtcatcggctggggacgcgagaaatagaagaaagtatctccagctacccgaacgtagcggaagtggcggtagtggggataaaagacgctctgaaagggcaggtggcggtggcgtttgtcattccgaagcagagcgatacgctggcggatcgcgaggcggcgcgcgacgaggaaaacgcgattatggcgctggtagacaatcagattggtcactttggtcgtccggcgcatgtctggtttgtctcgcagctccccaaaacgcgttccggaaagatgcttcgccgcacgatccaggcgatctgcgaaggccgcgatccgggcgatctgacaaccattgacgatcccgcgtcgttgcagcaaattcgccaggcgatcgaggaatagccgtaagccggataagccgcgtccggcaacgggttagcgtttgcgactgaatagtggggtgtaaagtcgggaaagggcggcagcgcgccgccctgtaacagaattaacgcagaatatttttctcagccagatccagcgcgaagtagctgaaaatcaaatcggcgccggcgcgtttaatcgagcccagactttccagcacgaccttttcttcatcgatggcgccagccatagcagcaaatttaatcatggcatattcaccgctcacctggtaagcgccaagcggcaactctgtgcgttcgcggatttcacgcagcacgtccagatacgcgccggccggtttcaccattaagcaatccgcgccctgggcttcgtcgagcagtgattcgcgaatcgcttcacggcggttcatcggattcatttgatacgtcttgcggtcgccttttaacgcggtacccgctgcttcacggaaggggccgtagaaagaagaggcgaacttagtggagtaggacattattgccgtatcggtaaaaccggcggcatccagcgcctggcggatagcctggacttgtccatccatggctgcggagggcgcaataaaatctgctccagccgccgccgcgataacggcctgcttgccgaggttggccagcgtcgcatcgttatccactccgtgttcgcacaacacgccgcagtggccgtgcgaggtgtattcgcagaagcaggtgtcggacatgacgatcatctccggcacggtttgcttacagatgcgggacattcttgccaccagtccgtcttctttccaggtatcgctgccggtgtcatcagtatggtgagaaatgccgaaggtcataacggaacgaatgccagcatttgcgatacgttcaatctctcgcgccagttgcttttccgggatacgcattacgccgggcatggcatcaatagctttgtaatcgtcgagttcttcttcaacaaagatcggcaacaccaggtcgttcaggctaagtgttgtctcttcaaacatagcgcgcagcgcagcggatttgcgcaggcggcgagggcgatggataaggtctgtcatggtctgcctgatgtttgtggaatcgaaggcccagtatacctgaatctgcaggcagatgttttacgaaaacggtccttaacgtagcaggcgcagccccagcggcagcagaacatgacgcttcctttatataccgaagattaatacctcaggcactatatcattttaaataagaattagttttacgttgtttttagttttatttcatcgtcatttaagtaaatgtgggtttcaacattattcatgtttattttgtttttctttaatccatatttatcttatatgtgttttgtttttttattttcttgtaaggccatgaaaaagaatgcttttcaattataaattttccttttattacgtccttttaattcatgtccgaatccggactgaggataaagaataattgaaccttttagcaatgacgccgcataatccttcttgctaaacatctgtatgtttttatgcattgataattgatggatcaactatattacgtccctgaggagggatgacaaatgcactcctggaaaaagaaacttgtagtctcacaattagcattggcttgcactctggcaatcacttctcaggcgaatgctactactaatgatatttctggtaccacttacaatacgtttcatcactacaacgatgcgacctacgctgatgacgtttattatgatggctatgtaggttggaacaactacgcaactgatagttactataacggtgacatttatcctgtaatcaataacgcgcgagttaatggcgttatttctacctactatctggatgatggcgttactaccaatactaatgcgaatagcctgacaattaaaaacagtactattcacggtatgattacctccgcgtgtcttgagggtaccgattgcgtaaatcgtgacaccgggtatgtatatgatcgtctggcgttgaccgttgataactctactattgatgacaactacgagcattatacctataacggtacctataccgatggtactgcggatacacatgttgttgatgtttatggcatgggtaccgcgattacactggatcaggaagttgatctgtctattgtaaataattctcatgttgctggtattaccctgactcagggctacgaatgggaagatatcgacgataacaccgttagcactggcgtaaacagtagtgaagtatttaataacacaatcaatgttgttgattctaccgtaacctctggttcattgtctgatgaaggtacttccggctggtttggtaatactaataacgctagcgattacagtggttcttatactgctgatgacattgcgattgcggcaattgcacacccatatgctgataatgcaatgcagacgacggtcaacctcagcaactccacgctgatgagcgatgttgtattctccagcaatttcgatgaaaacttcttcccgaatggagcggatagctatcgtgatactgatgctgaccgcgacacgaacggttgggatggcactgaccgtatggatgttaccctgaataatggtagcaaatgggttggtgcagcaatgtctgtacatatgacagacactggtactgatgccgatggagacggtgtttttgaatatactgtagatactaacggcgacggtattcttgatgccacatctccggatggagtttacgattcttatgctgtaggtaccgaggcaactgcaactctgatcgatatcgcagctaatagtctgtggccattatcaactgtaggtgttgataacatttatactgactacagtgagtataaccatatcgttggtaacgaagtttatcagagcggcctgtttaacgtgaccctgaataccggatcacagtgggacactactaaaacttctctgattgatacgctgagtatcaatagtggttctgttgtcaatgttgctgattctactctggtttctgacactatcggcctgactggtggttctgctctgaacatcaatgaagatggtcatgttgcaactgataccctgtctatcgataacagtaccgttacgattgctgatgatgtttctgctggctggagcgtaaatgatgctgccctgtacgcaaacactatcaacgtaaccaataatggtgtactggatgttggtaatagcgcttctaatgcgctgcaggttgatactctgaacctgaccagctacaccgatgctaacggttatgtgaacgctggtgtcttcaacatcgaaagtaaccgtttcgtactggatgctgacctgactaacgatcgtactaacgacacgactaagtctaactacggttatggcgtgattgcgatgaactctgatggtcatttgaccattaacggtaacggcgatacttacgataccgaccagacggaagcaggtcaggatgaagttgataacgttggtgacaatgttgcagctgccaccggtaactataaagtgcgtatcgacaacgccactggcgcgggttctgttgcggattataaaggtaatgagctgatctatgttaacgataagaacagcaccgcaaccttctctgcagcaaacaaagctgacctgggtgcttacacctatcaggctaagcaggaaggcaacactgtcgtgctggaacagatggaactgaccgactacgctaacatggcgctgagcattccttctgcgaacaccaatatctggaacctggaacaagacaccgttggtactcgtctgaccaatgctcgtcatggcctggcggataacggcggcgcatgggtaagctacttcggcggtaacttcaacggcgacaacggcaccattaactacgatcaggatgttaatggcatcatggtcggtgttgataccaaagttgacggtaacaacgctaagtggatcgttggtgcggcagcaggcttcgcgaaaggcgatctgagcgatcgtaccggtcaggtggatcaggacagccagtctgcctacatctactcttccgctcgtttcgcaaacaacatctttgttgacggtaacttaagctactctcacttcaacaacgatttgtctgctaacatgagcgacggtacttacgttgacggcaacacctcttctgacgcctggggcttcggcttgaaactgggttatgatctgaagctgggtgatgcaggctacgtaacgccttacggcagcgtatccggtctgttccagtccggcgacgactaccagctgagcaacgacatgaaagttgacggtcagtcttacgacagcatgcgttatgaactcggtgtagatgcaggttataccttcacttacagcgaagatcaggcgttgacgccgtacttcaaactggcttacgtttacgacgactccaacaacgatgctgacgtaaacggcgactctatcgacaacggcgtagaaggttctgcggtacgtgttggtctgggtactcagttcagcttcacgaagaacttcagcgcctacaccgatgctaactacctcggcggcggtgatgttgatcaagactggtctgcaaacgttggtgttaaatatacctggtaatcattttctctcaggagaaataaaggtaatttaaactgaaaaatgcccgtcaaggacttgacgggcattattgcaaggaatgcatatgttatctttaagcaagccactacaggaattctacagactcgataaatgcctttctaagcatggtacgcgtttcgagtttgttaatgataaagagattatctgttcacctgatgaaagtaatacccatacctttgttattttagagggggttgtttcgttagttcgcggtgataaagttcttattggtattgtgcaggccccctttattttcggtttagccgatggtgtggcgaaaaaagaggcacaatataaattaattgcggagagcggttgcattggttatcgcctctcatcatcacaaactcttgccatcattgagcaaaaccaactgtggcgtgaagccttctgttggatagtatggaaaagtcaggtactggaacttcgtgacaagcagctcattggtaataattcttacgaccaaattcgtgcgacgttaatgacaatgattgagtgggatgaagaacttcgctcacgtattggtgttatgaattatattcatcaacgaacgcgcgtatcgcgatcggtggtggcggaagttctcgcggccctgcgtaagggtaattacattgaaatgaataaaggcaaactgatcagtattaaccgtttgccctccgaatattaacaagaatgttgcgcctcgtctgatatagcgcgaggcgcgacgactcaggatgcaggaatagcaatcggtttattgccgcttagctcagtaaccaaatcgttaatcccgtcgctcatattggtaaaacgcgtgagaggggaacgggttacgaccacaaaagcgccaatattatattgcgggatcatcgccatataggtaataaaaccgccgcctcctcctgttttctggataatgccaggacgtccgtcttttggcgccatatagacccaacccagaccgagcgcgtcggctttacccggtacgtccatcccgatgattttctttaactgtgtgcgctgataaatcaacgtttgcatacgatcggcctgttggctacggtgatagaaatctgacgacagatactgttgcatccagcgcatcatatctcctggcgtagaatagaccccaccgctgccaatggcagccagcgtattattacaggggcttgcgcctttttctgccactatcagacgcttacactgatcgggagaaggggtaaacgtggtgtctttcattcccagcgggcgggtaatcttttcttcaaacagttgcgtataaggtttgccggaggcggtcgccagcgcgtcggctaacaggtcgaacgccagattggaataggccgcctgtgaaccgggcgcgacttttaacgttgctgtggagagccagttccagcgttgttcgcgggttggccagacaaataccggacgatgcgccgcgccgccgggctgttctcgcggaagcgcgctggtgtgggtcgctaagttgaccaacgtaatcggcgtgccttgatacgtcgggacatgcgcgccgggaggcgcatatttgctgagaggatcgtttaattttaccgttccctgatcgagcaattttaccaacatttcactggtcatgagcttggtgagagaagcgatacgaatgaccgaatcaagctgtggacgaacattattgcccggtctggtgtcaccgaaactacgaaacacgcgttgattgccgtcgatcaccaccagcgccatgcccgtggcaccgctaccataaaagatatgctcggcataacgatcaacgatatcagaggcaaaaaccggatcggcaatcggctgagccgcctggacagaagtaagtgatgccgcaaacagcatggcagtaaaaagcagactacgtttcaacggtgatgtccataagtgaaataacggtggttatgcgtatttatactacccggcggcacattgcaaaacgttaaagagaaaaaagtgggtgaaaaaacgtaacggcgggttttcgtgatggagaatgtttacttttgtgatagagcgcttgtgataacctgatagcgtcagcgtgcctgctgtgtatgaaactcgtcgaaacaattctgttgagcagaaatgcgaactaagcgtcacaacgtaggtcacaatgcctggtttagccctttcatttgcgtgggcatggcgtgctattgccgccgtcacagcagccgtaataaagataagaagttagcaggagagcatgatgtttaaatcttttttcccaaagccagggccgtttttcatgtcggcgtttgtttgggcgctgatcgccgtcattttctggcaggcgggaggaggagattgggtggcgcgacttgtgggggcatccgatgaagtgcctatcagcgcagcgcgcttttggtcgctggactatctgattttttatgcttattacctgatttgcgtgggattatttgcaacgttctggttcatctatagcccgcaccgctggcagtactggtcgatacttggcacctcgctcattatttttgtcacctggtttttggtggaggttggcgtcgcggttaacgcctggtacgcgccgttctatgatttgattcaaacggcgctcagctcgccgcacaaggtcactcttggtcaattttatcatgaagtgggggtgtttctcggtattgcgcttatcgccgtggtgatcggcgtgctgaacaacttctttgtcagccactatgtatttcgctggcgtaccgcaatgaatgagcactatatggcgcactggcagtacctgcgccatatcgaaggggctgcccagcgtgtgcaggaagacaccatgcgttttgcctctacactggagaacatgggcgtgagttttatcaatgccatcatgacgcttatcgcctttctgccggtgttagtcaccctgtcagcgcatgtgccgaatttacccatcgtaggacatatcccttacggcctggtcattgccgccatagtctggtcattaatggggacgggcctgctggcggtcgtcgggatcaaattgccagggctggaatttaaaaatcagcgagtggaagccgcttatcgtaaggagctggtctacggtgaagatgacgccagccgcgccacgccgcccaccgtccgtgaactgtttagcgcggtgcgccataactacttccgtctctactttcactatatgtatttcaacatcgcgcgcattctctatttgcaggtcgataacgttttcggtttgttcctgctgtttccttccattgttgccggtacgattacgctggggctgatgacgcaaatcaccaacgtgtttggccaggtgcgcggttcgttccagtatttgattaactcctggacgacgctggtggagctgatgtctatttataaacgtttacgtagctttgaacgccagttggatggtcagccagttcaggaagtgacccactcttttagctaacagaaggaaacgttatgtcggcggcgtcccgtctttatcctctgccttttctggcggttgccatattggctggctgtagtagtcaatccgggcagccggtgagcaagggcgagaagcctgtcgacgtggcaagcgtagtacgtcagaaaatgccagccagtgtcaaagacagagaggcctgggcgaaagatatcgcgacaacgtttaagagccaggggctggcgccgacggtagaaaatatctgttcggtgctggctgtcgcccagcaggagtccggttatcaggcggatcctgtcgtgccggggctaagtaaaatcgcctggcaggagattgatcgccgcgctgaacgactacacattccgctgtttctggtgcacaccgcgctgaaaattaactcccccaacggcaagagctatagcgaacgcctggacacggtaaaaaccgaaaaacagcttagcgctatttttgatgattttatcaatatggttcctatggggcagacgctatttggctcatataacccggtgcatacgggcggcccgatgcaggtcagcattgcctttgccgaacagcacgcgaaaggttatccgtggaagatggcgggtacggtacgtcaggaggtctttacgcgccgtggctggttgtggtttggaacttaccatttgctgaattacccggcgaactacagcgcgcctgttttccgcttcgccgacttcaacgcgggatggtacgccagccgtaacgctgcgttccagaatgccgtcagtaaagccagtggggtaaaactggcgctggatggcgatctgattcgttataacagcaaggaaccgggcaaaacagagttagcggtacgcaaactggcagggcagttgggaatgagtgagcgtgaaattcgcagccaactggagaaaggcgatagcctggcgtttgaaaaaacggcgctctacaagaaagtctataaactggccgaggccaaaacgggcaagacgcttgcgcgggaaatgttgcccggtattcaactggaaagtccgaagatcacgcgcaagctgacgaccgcctggtttgctaaacgagttgatgagcggcgggcgcggtgtatggggcgataaatttcgcgctgggatattttctccagcgcgctaaggtttattggtgacggtgacgccagcgtaaaaacgcggcgataacggcgaaaatgaggcagcccgtgaggaagggcaccaggccaaaaatcgtcccgacgcccagcccaatctctacccgcggtcgacctgtatcctgtacctgcatcagatgctcatagatgcccggcgcatgaaccagcaggtttaagagttgcgctccggcccagaagcaaaacagtacaaatatggcgtaagcaatatttccgggcgtagaggaggtttctcgatgcttcccgctgaacagcgattttgagagagtgaaatcagccataaagacctccaggatgatcggctacgatctggcgttatgccatcggcttactgtgaagtctgacaggtcattgtgtttgtcaatatcagaatcatggtaatttcacatacggaatgtatccatcgcgtaaatttttgttagttgtcacaaaacgatcacttttatcaaaattaattaacatttaagaaattccgtatcccccacagactcgcccgccagaagtatgcaaaaatacgtttttgttgctgttaatacgtcggagtcgttatgcgtttgcctgtaaaaattcgtcgtgactggcactactatgccttctctattggccttatctttattttgaatggcgtcgtaggattgctgggatttgaggcgaaaggatggcaaacctatggtgttgggctggtaacgtggattattagcttctggctggcggggttcattattcgccggcgcgaagatgatgaggtaaaagacgcccgataaacgttgcgctatcgggcgtgcggtattacatcgtggtttttaaggcgttattcgccgtatggcgttccagcgccagctcaatcaggcggctgatcaaatcggtatagcccaatccgctcgcctgccagagttttggatacatactgatattggtaaaacctggcagcgtattaatctcgttaatcacgacctcattgtctgccgttaagaagacatcgacacgcgccatacccgcgcatcccagcgtctgataagcctggatcgcgatcgcgcggatcttgtcattcaccccggaaggaagctgcgcaggcacgacaacttgtgcgccattatcatcaatatacttagtatcgtaggcgtaaaattcgctgttcagtacgatttcgccgcaggtactggcctgtgggttatcgttacctaatacggcgcattcgatctcgcgccctttgatcccttgctccaccaccactttatgatcgaattcgaaagccagcgcgaccgcctgctgatattgcgcttcgttagcgactttactaacgccgaccgaagagccctgattggcgggcttaacgaacagcggcagtcccagacgggattcaacctcggcaaaactaaacgcgtgacgattcgttcgggtgagtgtaataaacggggcgatattcagtcctgcatcgcgtagcagtcgtttggcgatgtctttatccatgcaggctgcggagctcagcacgtctgaaccgacaaacggtaagtttgcgacgcgcagcatcccctgcaatgagccgtcttcgcccagcgtaccgtggacgataggaaaaataacatctaccgtcggtagcggctgcccgttctgggcgttaatcaattggtgttgatgtttgccaggcacctgggccagactgattgccgaaggacgtagcgcgatatgtgccggatcgtctgcattctgcaaataattttccgcatcgttaacatgccattgtcccgccttatctatccctaacagcaccacgtcgaagcgggttttatcgatcgcatcaacgatatttttcgctgattgcaaagacacttcatgttccgccgacttaccgccaaatactattcctacccgcaatttcgccatcttaaaaacccattccatcgaatgcaaagcgtatacattaccacgacaaaacgcgggtttcgcggggttctgccataatgtttatgggatgtgagaacggaggccgcgtgagaggtaagggttttctgattattgtgctgttgggcggtattggcgggctgggatatcgttatcttccctcttattataatccttttgctccgctacaacttgccgatccgccaggctggatcactaccttcaaactacagcgcctgatgccgtcgcagtgccgggagctgttgacggcggccaatcaacagggattaatttcatcacaacctgttgcggatagcgctggtgaatgtcccttgtcccatgttgtgcgcgtcagagattttggccaggtcaaactgagcagcagttttttagcctcctgcccgttggcgctgcgctccgcgctgtttgtcgaacagcaggcaaaacctttaacagaaacgtggatgaagcgccgcctgacccgcatcgaacatctgggtagctatgcctgccgtaatatttatcaccgcccggatgcgcgtcgcagtgaacatgccagcgcagaagcgctggatatcagcgggtttcagctatcagatggccgaaaaatcactgttctgcgcggctgggggcgtcaggagacggggccctggttacgcgctatgttaaacgccagttgccattattatggcaatgggctcgggcctgactataacgctgctcatgctaaccattttcatcttggaatgcggggctacggcgtgtgtcgttaaagcataaacgtctgccttgcgcggctatataatgtgacatgtttcacaaaaatgatgaacggggagacaaaatagcaaagtgtgacgtatcgcacctctggaaccaccaggaaaaagagaacttgctaagctaacgcgtattttcagctacttaccgttacgagtcttatggaatcctggaaagttaatctaatttccgtttggtttggatgtttttttaccgggctggcaatcagccaaatcctgccattcttacccctttatatttcccagcttggcgtctcttcccatgaagcgttatcaatgtggtccgggttaacgtttagcatcacgtttcttatttccgccattgtgtcgccgatgtggggcagtctcgccgatcgcaaagggcgtaaactgatgctattgcgcgcgtcgctcgggatggcgatagctattctactgcaggcattcgcgacccatgtctggcaacttttcctgctgcgcggaatcatggggttaacgtcaggttatatccccaatgctatggcgctggtagcctctcaggtaccgcgcgaacgtagcggctgggcgctcagtacgctttctaccgcgcagatcagcggcgttatcggcgggccgttaatgggcggctttgtcgcggatcatatcgggctgcgggcggtatttctgattactgccatgctgttggtggtgagctttctggtcacgctatttttaattaaagaaggcgtgcgtccggtcatcaggaaaagcgaacgcctgagcggtaaagccgtttttgcgtcgttaccttatcctgcgctggtgatcagtttgttttttaccacgatggtcattcaactctgtaatggttccatcagtccaatcctggcgctgtttatcaaatcaatgatgccggacagtaataacatcgcctttcttagcggggtaatcgcctcggtgcccggtatctctgcgcttatctccgcgcctcgcctgggaaaacttggcgacagaatcggcacggaaagaattctgatggccacgcttatctgcgcagtgctgcttttcttcgcgatgtcctgggtcaccacgccgttccagctggggctgttacgtttcttgttaggctttgccgatggcgcgatgttacccgccgtacaaacgttattggtgaaatactccagcgatcaaattaccggacgtatttttggctacaaccagtcatttatgtacctgggcaacgtggttgggccgttgatgggcgcgacggtatcggcgatggccggtttccgctgggtttttatcgctacggcggcgatcgtgttgatcaatatcgggcaactgaccctggcgttacgtcgtcggcgtaacgcgcaaaaagcgaaaggccaatagcggtgcatcgtaacggcacttctgccgttacgatatggtttaaattaaaagatatattctttatccgtgaagtttttctatagatggcataaccttaaattatgatatagcgtgattattgttttttgatggtttattatcgtctcgtttacggcctgagaaacgtttcgctgcggcgacagtgataattatttgtgtaaagttcttcctgtatcataaaaatagtactttcagcctctaggcagtggttcttcatagtgataacgtcaccctggaactaataaggaaatatggtcatgaaaaatctcatagcagagttgttgcttaagctagcccaaaaagaagaagagtcgaaagaactggttgctcaggtagaagcgttagagattatcgtcacagcaatgttacgtaacatggcgcaaaacgagcaggagatgttgatacgtcaggtagagggggcacttgaaggcgtaaagccggatgccagcgttcctgatcacgatacggaattgctgcgccaatatgtaaaaaagttgctgagacacccccggcactaatcgtatttaaaacaacacagttgttataacgttacttttataaaatagccctggccgcttcgtttttattttgctctgtattaaccagaagaaaataaaaacgaagcggctatggtaataacagtgtaacgttatgcgttgttcttctgcatcctgcgtgactgtggataatcgagttgcacattagcctacggtttgtcaatcaataaaacatatattgctaacggtaagtaatacttttactgccgggtggtatttttgccagtaacagccagacttatataaagtccctgggatatttcccaaagggacaacgtgtaatgcgtacactgacaaaaggatggtgctatgaaaataacattactggtgactttactttttggcctggtctttttaaccgccgtcggcgcaaccgaaaaaccgttaacaccgcaacagcagcgcatgacgacctgtaatcagcaggcgacagcgcaagcgttgaaaggcgatgcacgtaaaacttaccttagcgactgtctaaaaaacagccagtcaggccctggcgagaaaagcctgacgccgcaacagcagaaaatgcgtgaatgcaatgttcaggcgacggaacaatccctgaaaggcgatgaccgtagcaagtttatgagcgcctgcctgaaaaaagcggcgtagtgctatcgggtgagccctgaaaaacactcacccgaaatttcatacttcctccatgcgctctgtttctataatttgggaaaattgtttctaaatgttcccaaaaataatgaatgatgaaaatttttaccgaaaagcggttgaacaggcggtagcgccgcctgaccctcctgatgatcgtcagcgctccgggttgcgcttcgcccggcgcatcaggctaccgcgtgcggtggggttaggggggatgtttttaccggtggccgccgtgttagtgtcgcaacctgtctttggcggctggtggctattgctggtcggctggtcttttgtctggccgcatctggcgtggcagtgggcggcgaaagcccttgatccgctacgccaggaaatttacaacctgaaagtggatgcgatcctctccggcatgtggatcgcgttgatgggcgtcaatatgttgcctgccgccgcgctgtttatgatgatgagcatgaatctgatgggcgctggcgggcggcggctattcactgtcggaatgggccttttgctggcgtcatgtctggtgacgttgcagcttaccgggctacctgtcgcgatgcgaagctcgtcgctggaagtcacgctctctttgcccgtcattatgttgtatccgctgctgttcgcctgggtaagttaccaaacggccattaaattagcggaacataagcgacgcttgcaggcgatgagctcgcgggatggcatgaccggcgtctataaccgacgccactgggaaattttattacgtaatgaattcgatcacagccgacgccaccatcgggaggcgacattgttgattatcgacatcgatcattttaagagcattaacgacacctggggacatgatgttggggatgaggctattatcgccctgacgcgtcaattacagataacgctacgcgggagtgatattatcgggcgctttggcggcgacgaatttgcggtgattatgtgcggaacgccggcagacagcgcgattaccgccatgtcgcgagtgcatgaacggctaaataccttacgcttgccgggcgcgccgcaggtcatgttacgtatcagcgtgggcgtggcgccgttaacgccacaaatcggtcattatcgggaatggttaaagtctgcggatatggcgctttacaaagcaaagaatgccggacgtaaccgcaccgaagtggcggcatgacgtccagccgggcttcaggatttactgatcgcctctgatttttccatacacttcgtcatcgcttctattaccgcagcgcggaagccacgttcttccagaacgcgtacggcttcaatcgtcgttccgccaggcgagcacaccatatctttcagttcgccgggatgctttccggtttcgagtaccattttcgccgaccccatgacggcctgcgcggcgaatttataagcctgagcgcgaggcataccgcccagaacggcagcgtccgccatcgcctcgataaacataaacacataggccggcgaagatccgctcacgccaaccaccggatggatcatcggctcagcaatcacctccgcctcgccaaagcagcggaaaatattcagcacatcagccgtatcttccggtgtgaccagcgcgttgggtgtgacggaggtcattcctgcgttgaccagcgacggcgtattcggcatagcgcgaatgattttacggtcgtgtcccagcgcgcgcgcaagctgatcaagcgttacgcctgcggcgatagagaccaccagcgagtctttgttcaggctggaggagatttcactgagcactttcaccataatgcccggttttaccgcgccgaaaacgatatccgcgacctgagcgacctcctgcgcgctttgcgccgcattaatgccgtactggtcatgcagggcggcaactttatcgggggagggggtgtagacccagatctggccgggaagtacctgaccgctggcaatcagtccgccaagaatagccttgcccatattaccgcagccaataaaaccgattttcttctccatctcgtcactccctatgtttgtgtgttatggggaatggttagcttaacgcggattgaaaacgggcagaaggagaaacagtactttgatgaaagacaaaagcgcgagacaataaaagattgtataccgtacgggagacattatgaccatctgggtggatgcggatgcgtgtccgaatgtcattaaagaaattttgtaccgcgccgccgagcggatgcagttgccgcttattctggttgccaatcaggccttgcgcgtgccgccttcgcgttttatccgcacgctccgcgtggccgccgggtttgacgtggcggacaatgaaatcgtgcgtcaatgcaaagcgggcgatctggtgattaccgcggatattccgctggcggctgaagtgctggaaaaaggcgctgcggttcttaatccccggggagaacgctatagcgacgccacgattcgtgaacgtctgacgatgcgtgactttatggacacgctacgcgccagcggcgtacaaacgggggggccaaacactctctcgccgcgcgatcgtcagcattttgccgccgagctggataagtggtggctggaaagccagcgtaaaaaataaatcctgtaatgaaaaatttacagtttattcatttctgattcttgctatagtactaatattgtgactttagtacctttgtgtaaattattatttacatttatgcgttgtactagttagatgatatgattataacattgctgatatcaaatcctgcgtatgcgcagttcctgggggaacgcctgctatgatgcaacctctttatcttgttggcccgcggggctgtgggaaaaccaccatcggtatggcgctggcgcaggcaaccggttttcggtttgcagataccgaccgctggctgcaatcgcacgtgcagatgagcgtcgctgatatcgttgaaaaagaaggctggggagggttccgcgcccgggaaaccgcggccctggaggcggtaagcgcgccttcgactgtcgtggcgacgggaggcggtattattctcacggagtataaccgacgttatatgcaccgtgttggcgtagtgatttatctgtgcgcgccggtatccacgctggttaaccggcttgaggctgaacctgaagcggatctgcgcccgaccctcaccggcaagccgttgagcgaagaggttcgggaagtgcttgagcagcgtgacgcgttgtatcgcgaaacggcgcattacattattgacgcgacgaaagcgccggcccaggtcgtttctgaaattattgcggcgctgccgccgtcgacgcaacggttacagggagatgtctatacttaacgctcacccagaataaaggaaacgctatgccaaccagaccaccttatccgcgggaagcttatatcgtcaccattgaaaaaggcacgccgggccagacggtgacgtggtatcagctacgggctgaccatccgaaacctgattcgctcatcagcgagcatccgaccgcagaagaagcgatggatgcgaaaaaacgttacgaagatccggataaatcatagacgcatgaaccactcggaagggattctgagtacccctaaattgtatctccatcacattcttgaaacatttatactggcaactaaaaccgtaaattaagcgataacaatacaatattggagttatttggaatctttacacaatacgttgctcatctgctgctacgctttctgagatttgtagggcaggtagcgcggtgagcgtgtgaatatttgcccgggaattacgacgaagtaataaggtggaataaaaatgagtgcgtcgttggcaatcctcacaatcggcgttgtgccaatgagcgaagtgttaccgcttctgacggaatacatcgacgaacaacacatcacccatcatagcctgctgggaaaaatgagccgggaagacgttatggcggattacgctgtagagcctggcgacgatccgcttttgacgttgctgaatgataaccagatagcccatgtttcccgccagaaagtggagcgagatttacagagcgttgtcgaggtgctggataatcagggttacgatgtcattatactgatgagcaccgcggcgattaaaagtatggcagcccgtaattctattttgcttgaaccgctgcgtattattccaccgcttgtcgcctctattgtggatggacatcaggttggcgtgattgtgcctgttgcagaacttctggcggcccaggagaaaaaatggcaggtattgcaaatgccgccggtgtattcgctggcgaatccggttcacggttctgagcaacagttaattgatgccgggcaggcgctactggatcaaggcgcggacgtcattatgctggattgtctgggttttcatcagcgtcatcgggatattttacagcaggcgctggatgtgccggttttactctctaatgttttgattgcgcggttagcttcagaactgcttgtctaattttacgtgacaggccgaacgtcaggactctatattgggtgttaatttaataatgagacggggcctgattatgctacaaagcaatgaatacttttccgggaaagtgaagtctattggatttaccagcagtagcaccggccgggccagcgttggtgtgatggcggaaggggagtatacatttggcaccgccgaacccgaagagatgacggttgtgagcggcgcgttgaaggtactgttgccgggaactgtcgaatggaaagtgtatacagccggtgaggtgtttaacgtgcctggccacagcgagtttcatctccaggttgctgagcccacctcgtatctgtgccgctatttgtaacggtgagtcccctctccggcggagaggggccctctggttagcgctgcgcttcgccgcctaatccttccaccaggctttgaatcagcgccgccagctcgccggtcatcaggataaagtccgcgtcaaaacgttgggcaaaatcttcccggtcgatatcttcgttctggtcgcgcagctcatcgcagaatttcagacgcttaatggagccgtcatcgcacatgacgaattgaatgcgctgctgccagtcgagcgccagcttcgtgaccactttacccgcttcaatatgaacggcgatctcgtcgctgaccagatcctgctttttcgcgcggatcacgccgccatcttccagcatcgctttcaattcggcttcgtccagcaactggaaaccctgagcgaccgtaccggagcgcacccactcggtgagcgtcagctcaatcggattttccagcgccagcgggacgaccggcagcgagccaagacttttacgcagtagcgccaaagtatcttccgcttttttcgcgctggcgcagtcaaccataatcaggccgttaacggtatcaatccacatcattgtctgactgaagcggctaaacgcgcgcggcagcaacgaatgcaacacttcatccttcagggaatctttttccgtcttcttcagcttgcgtccctgatcggcttccagtttctggattttcgcctccagagcctgtttgatcactggcgatggcaggattttctcttctttgcgcgcgcaaataataatctggccattggcggtgtgcgttaacgcatcgctgtgagagcccatcggcggaacccagcccattttggccatatcctggctaccgcatggggtaaacgtcattgaggcgagctgtttctccatctcttcggcgcgtaatgtaatatcgcggctaagacggtaaaccattaaatttttgaaccacagcatgataatttccacggccttgtcgttaaatccaggcggtatagtaacgaattgtcggcaggcttgcattgccaatcagaacggtgaattctaccctgttgatattcccaaaaaatgaggagcggtatgtgcgtattggtatcgatttaggcggcacaaaaacggaagtcattgcgcttgatgatgcaggagagcagcggtttcgccatcgtctgcctacgccgcgggaggattatcagcaaacgatagaaaccatcgctacgctggtcgacatggcggaacaggcgaccggccagaccggtagcgttggcattggcattcccggttctctctcgccttacaccggcgtggtgaaaaacgctaactctacgtggcttaacggccagccgttcgatagcgatgtgagccgtcgtctgaagcgtgaagtgcggttagccaacgatgccaattgcctggcggtatcagaggcggtagatggcgcggcggcgggggcgcaaacggtatttgcggtgattatcggtaccgggtgcggcgcgggcgtagcgctaaatggccgggcgcacatcggcggcaacggtacggcaggcgaatggggccacaatccgttgccgtggatggatgacgatgagttgcgttaccgcgaagaaattccctgttattgcggtaaacaaggctgtatcgaaacctttatttccggtacgggattcgccacggattaccagcgtttgagcggtaaaacgctaaaaggcgatgagattattcgtctggtcgacgcgcaggacgccgtggcggaactggcgataagccgttatgagctacggctggcgaaggcattatctcatgtcgtgaatattctggatccggatgtcattgtgctgggcggcggtatgagcaatgttgagcgcctgtacaaaacggttccgtcgctgatgaaatcgtttgtttttggcggcgagtgcgagacgccggtacgtaaggcgcggcatggcgattcgagcggcgtgcgcggcgcggcctggctgtggccgctggcgtaacgttgttagccggatggcgcgtcatccggcaaccggcgtgaccgatggctgcttgtgttttagacgtccgtataccagcaacgacgacatggcggaaaacgagagcagggcggcgggaagcgccacatagtggtacgcaaaacctagcgtcagcatcagcccgccgcaccaggcgccaatcgcgctaccgagattaaacgcgatttgccctcccgccgcgcccagcagttcgccgcctttggcgttttgcagcagcaggatttgcagcggcgcagagagcgcaaacagaccagcacagcagataaacgcgaaagtcagcgatgccgttttgtatccgctgaagaaaaagagcgccatgagagagagcacgataacgaggtcagtcactaccgcgatgcgcagcggagtatatctgccggagagtttgccgcttaacagattgcctaacaccatccccagcccgaccagcatcataataaacgtcatgctcgtctccgaaaaaccggagatgtacatcataaatggcttgatatagctgaaccaggcaaaaacgcccgcattgccgaacatcgtggcggcgaaaatgagccacggcgcggggctacgcaagaagtgaaactgttcgcgcaggctgccttgggctttgtcacggatatccggcacccagaagaaaattgcggtgagcacggcgatgttgaaaaccgcgatcaataaaaaggtgtagcgccagctaaattcctggctcaggtaagtgccgaacggaatgcccaccagattcgccaccgtcatccctgaaaccatacccgcgacggcggcggtgactttcccggggcggataatctttgacaggacaatggcgccgacgccaaaaaaggcgccgtgcggaaagccggaaaccagtctgccgacggcgagcatcagatatgacgaggaaaaggtaaatatggcattgcccatcacgcacagcgtgaccagaaacagcagtatatgtttaagcgaaaagcggctggaaaagagcgccataacaggcgcgcccagcacgacgccgaaggcgtaaaacgagatcatatgcccggcggcgggaatcgttattccgacatcgcgtgccagctccgtcagcacgcccataatgccaaactcggccatccccaggccgaacgtacccagcgccaaagaaaaaataacttttttcataccacctgccgaaaatgaagacgcatgtcgcgcgctgcggctatgaattgtcacagccaatcaacgtatagcttgcggataagcgcgaggtaataccattccttattcgtctttgtgtattcattattatgctatgtcatgacggtatgctgtgtgcaggatgacattcgcgttactccacggcaaacgctttgtccagtttgctataaccaagcccattgatttttttcacttttatctgcacagggatacgttctttcatggcttccacgtggctaatcacaccgatggtcttcccgctggcattcagcgcgtcgagcgcatccagcgcggcgtccagcgtttcgctatcaagcgtgccgaagccttcgtcgaggaacaaagaatcaatgcgcgttttatggctgaccaaatctgataacgccagcgccagcgccaggctgaccaggaaactttcgccgcctgataacgttcgcgtatcgcgcacggcgtcggcctgccaggtatcgacaacctccagttccagcgcgtcgctggctttgcgctgcaataaatagcggccatgcaggcgggtgagctgatgattcgccagccagaccagattatccagcgtcagtccctgggcgaatttgcggaacttatcaccttctttagagccgatcagcgcattgagatagccccagtcttccacttgctgagaggcttgcttcatttccgccatcagcgcgcgttggcgctgccgattatctgcatcctgtttaatttgctggcggatttccccctggcgtgtcgtgttttcgcgcagttgttgcgccaactgcgtcagccgctgcgcgagctgctccgccgtacacgttgggtccagaccagcgggcggctgttgctgatggtcagccagcgcctgcgcggactgcgcgcttaacgccttcgcttgttgtagctgactttccagcgtttgttgttgtttttccagacgggtcacggtctcttcatccagcaacgccgccaggaacgttgcctggctgtcaaacgggctattttttaacgccgcatcaaagtgcgctatcgcctcggcggcgcgctgctgctcctgcgtcgtctgttcctgcagggtttgcaactggctttgtaatgacacgcactcatcatgcgcctgccgccagttatccagcggcacgtcgtcgtcggaatccgcggtatccgtttgcggtagcgtctccagcaacggggcaagcctgtcgatctgcatttgcaaatccgcgaactcggtctgacgctgttgccatattttcgcttcgtcggcgcgctcattcagccacgaagcctcgtcttctggcgctggaagggaaagcgtatactgcgccaaatcagccgtcagcgacgcctgacgctgcgcaatctgcgcggtaaagcgcgctacctgttcagtatgcgccgcgatttgcgtttgtagagcatgacgctggctgagctgatccaactgttgctcatgctcttccgcggcggtcagccagcccgcgaggtcttcttgcggctggagctgaacgcccagcgtagcgcacagcgtttgccattcctcagtaagcgcttgctcctcctgcaacaacgactgcgcctcgctttcatcccgctgtaattgttgcgttaaggcatctaactgtcctcgcagcgcagcgccttcttccgccagcgttttgacctctttttccagcgcgtcgcggcgggtttgattcgcgctcagctccagcgcctgataggcggcgatggcggggtgtgtcgtcgagccgcaaagcgggcacggctggccggactgtaagtgcgcccgctggctttccagatctttgatgcgcgcctcctgctcgcaaatagtgcgaacgtccgcaagctcctgcgctttagtcttataactcaggcgcttatccgccagacgttgggtgtattgcgcctgttcctgatgatgacgcgcgatagctgcctgtagctgcgcctgacgcttttgtttcgggagaatttgcccctgaagcgcggcgagacgatggcgtagcggacgctgccgagtatgcaatgccctggcttccgccagcgcctgtggcgtgaggtcgagcgtgagcggcggtagcgcatcacgctgacgcgtatcgctcagcaactgctgttgccattggctcagttgcgcccgatcgtgggattgttgtgttaataatgctcgccaccccgccagttcgctgcgccagatgcggatgccgtcgtgttccgccagccatgtcttcaaccgctgccctgtggtgttcagttgcgtgaattgtcgatgcgcgcaggcgcggatacgccggcgcaggcgatacgcgctttgtaagcgagcattcacttcatcactgtgctggcgaacacgctcaacggcgcgggtttgttcctgaatgcgctcccaatgcgggcgcaactggcgagcgggttgcgccagagtcaacgccgcgagctgcggctgcgctttttctcgcgcctcttgtgccgcgtacagcgcctgctgccgggcgtgtaattcagtgtggagctcgttttttcgggtcagccagtgaaggtgctgctgctgtacctgctggtcggccagcaggcgtttctcttcgtcagtaagcgcctgcaaactagcttccagttgctgtaactgttcgtccgccaatagggcgacgccgctggcctgcgcttgtaacttttccagttcgagacgggctgatttatgtttttcaaatacctgtgcggagatctgcccgtaaatctcagtgccggtgagctcctccagaagctctgcgcgctctttcgctttggcgttaagaaaggcggcgaactgcccctgtgataacaacatcgaacgggtgaagcgcccgtagtccagcccggtcaacgtggcgatcatctccagtttatcctttaccttatcggcaaagatctttccgtctgaacaccgcgccagctccacgcgtggggcctggagattgccgtcaggctgatttcgggctcggttctggctccagaacgcgcgccaggcttcgccttttacctcaaactccacttcggccagacattccgccgtatcgcgcgtcatcaaatcgttttgcgattgcgataccgtattcaggcgcggcgtttcgtggtacaacgccaggcagatggcgtcaagcaaggtggtttttcccgcgccggtcgggccggtaatggcgaataacccgttactggcaaacggttcggcggtaaaatcgaccttccattctcctttcagcgagttcaggtttttcagacgcaaactgagaattttcatgcctcatgctcctcattcaacgcgtagagcgtgctggaaaagagctgattcaggcgctcgcgctgcggggtatctaacgcttccagcgccagacgccgcgcaaaaacctcttccacgctaagctcgcttaatgtttcccgccgctcgttcgccagcgagcgctcgcgctgttcgcggctacggcgcaccagtaatacctctacggggagtgactccgttaatgtctgtattctgcgttggatatcgtgcagatagtcatcggttgtgatttcaatatccagccagacggggggcgattgctcaacgccgcgccactgctcaagctgttcggtaattgatgccaggtcgccttttaaaaccgccaacggttgagtcacggggacagccagactttcggtgctttgccatttcccctggtcgaaggtcaccagatgcacgcatttgcttttgccgcactcatcaaagctgagggcgatgggcgagccgcaatagcggatatgctccgtgccgccgacacattgcgcgcggtgaatgtgtcctaatgcgatataatctgcgggggggaaatgctgcgccggaaaggcatccagcgtaccgatataaatgtcgcgaaccgcatcgcttttgctggcgccgacggtggttaaatgtcccgtcgcgataaccggcagctttcgttcgccgcgtagctggcacgcttcctgatactgctgttgataataatcggcaatcgcatgaagaagttgctgctgtttctcgctgccggataaccccgcctgactggtaataatgtcgcgcgggcgcaaaaagggaatggggcacagtacggcgcccggagaaccgtcgcgacgatgaagtagccgcggcgcatagcccgcgctggcgatcacggttgtattgagaaacgccagaatgtcgcgcgactcgtttagcgtggcgacggaatcatgattaccggccagcaccaccagatgacagcccgtttgctgtaaattaacgacgaaacggttataaagttctcgggcatagcttggcggcgaaccggtatcaaaaatatcgccagcgacaataatggcatccacctgatgggcctgcgcggtctccagcagccagtccagaaaagcctgatgctccgcggcgcggcttttactgtagaaattttgtcccagatgccagtcagaggtgtggaggatgcgcataattgttccatgcaaaaaaagcgtgaacgggattatacacgtcatcccttccatttttgggcgcaatttaccgccggtacacggtaatgcacggtttcaccggtgtcataaatcatcaacatgctgtcaatgccgcctttttttttcataaatctgtcataaatctgacgcataatggcgcggcattgataactaacgactaacagggcaaattatggcgagacgtattctggtcgtagaagatgaggcgccgatccgtgaaatggtgtgcttcgtgctcgaacaaaatggctttcagcccgtagaagccgaagattatgacagtgcggtgaataaacttaatgaaccctggccggatctcatccttcttgactggatgttgcccggcgggtcagggttacagtttattaaacatctcaaacgtgaagccatgacccgggatattcctgtggttatgctgaccgcaagaggtgaggaagaagatcgtgtgcgcgggctggaaaccggcgctgacgattacattaccaagccgttttcccccaaggagttggtggcgcgcattaaagccgttatgcggcgcatctcgccgatggcggtcgaagaggtgatcgagatgcagggactgagccttgatcccggctctcaccgcgtgatgaccggcgacagcccgctggatatggggccgaccgaatttaaattactccatttctttatgacgcacccggaacgggtttacagtcgcgagcagctactcaatcatgtctggggcaccaatgtgtacgttgaagaccggacggtcgacgtgcatattcgccgtttgcgtaaggcgctggagcacagcggccacgaccggatggtgcaaacggtacgcgggacagggtatcgtttttcgacccgcttttaatgccttttccgccagtagaacacaggtttctggcggagaaggctttccattcttgagggagtatgacgcgtgctggaacggctgtcatggaaaaggctggtgctggagctggtgctctgttgcatccccgcgcttatccttagcgctttttttggttatctgccgtggtttttactggcggcggtgacgggactgcttgtctggcatttctggaatttgttacgcctctcctggtggctttgggtcgacagaagtatgacgccgccgccgggacggggaagttgggaaccgctgttatacggtttacaccagatgcagttgcgaaataagaagcgtcgccgcgagctggggaacctgattaaacgttttcgcagtggcgcggagtcgctgcctgatgccgtggtactgaccacagaagagggcggcattttttggtgtaacggtttggcgcaacagatactggggctacgctggccggatgacaacgggcagaatattctcaatctactgcgttatccggagtttacccagtatttaaaaacgcgtgatttcacccgtccgcttcatttggtgctcaataccgggcggcacctggagatccgcgtcatgccttataccgataaacaactcctgatggtggcgcgcgatgtgacgcaaatgcatcagcttgaaggcgccagacgtaactttttcgccaacgttagccatgagttgcgtacgcccttgacggtattgcaaggctatctggaaatgatgcaggaacaggcgctggaaggggcgacgcgagagaaagcgctgcatacgatgcgcgagcaaacgtatcgtatggaagggctggtaaaacaactgcttacgctgtctaaaattgaggcggccccggcgctgttattaaatgaaaaagtggatgtaccgatgatgctgcgggtcgtggagcgtgaagcgcagacgctcagccagcagaaacatacctttacgtttgaggtcgacgatagtcttagcgttctgggcaacgaagagcagctacgtagcgcgatctcaaacctggtgtataacgcggtaaaccatacgccggcgggaacgcatattacggtgagctggcgacgtgtcgtgcatggcgctgaattttgcattcaagataacggtccggggattgctgccgagcatattcctcgtctgaccgaacgcttctaccgcgtcgataaagcgcgttcgcggcaaacgggcggcagcggcctgggattggcgattgtgaaacatgcgttgaatcaccatgaaagccgccttgaaatcgacagttcgcctggcaaaggaacgcgatttagctttgtgctgccggaacgtttaattgccaaaaatagcgattaattgcctttcgtaagtataactttccataagccagcggatgctggcttattttctttgcagttaagacgggctcgttgaaacattcaacgtttggtgattttttgttcgcatgattagccataactttttcatgagaatggtgttttattctggttgtaaatttcatatcgctatattcatctggtttttagatcccaccttgctttaaaacgttataagcgtttaaattgcgcttcaggtgctgtcattacgactgcatttgcgcggtaaatcgaaaaacaattcttcgccgcatcggtccgggagcttttcccgctgaaattgataaaaaacgccgctttataatcctccgggaaaggcaaaaattttaatgtttacaacatcaccatccacaggcagtaagactttatgacccatcagttaaaatcgcgcgatatcatcgccctgggctttatgacatttgcgctgttcgttggcgcaggcaatattatctttcctcctatggtcggtttgcaggcgggtgaacacgtctggacagccgctattggctttctgattaccgccgtagggctaccggttcttactgttgtggcgctggcgaaagtcggcggcggcgtagacagcctcagtacgccgattggtaaagtggcgggactcctgctggcgaccgtttgctatctggccgtcgggccgttatttgcgacgccgcgtaccgcgacggtgtcgtttgaggtcggtatcgctccgttgaccggcgattctgcaatgccgttgctgatttacagcgtggtctatttcgctattgttattctggtttccctctatccgggtaagctgctggatacggtagggaatttcctggcgccgttgaaaattattgcgctggtcatcctttccgtcgcggctatcgtttggcctgccggtccaatcagcaacgccctggacgcttatcagaatgcggccttttctaacggatttgtgaacggctatctgacgatggatacgctgggcgcgatggtgtttggtatcgttattgtgaacgcggcgcgttctcgcggcgtgaccgaagcgcgcctgttgacgcgttacacggtctgggccggcctgatggcgggcgtggggctgacgctgctttaccttgccttgttccgcttaggttctgatagcgcgacgctggtcgatcagtcagcgaacggcgcggcgattcttcatgcctacgttcagcatacctttggcggcgcgggaagcttcctgctggcggcgctgatctttatcgcgtgtctggtgacggcggtggggctgacctgcgcctgcgctgagtttttcgcgcagtatattccgctgtcttaccgcacgctggtctttattctcggcggcttctctatggtggtgtcaaacctcggactgagccatctgattcaaatttccattccggtgctgacggctatctatccgccgtgtatcgcactggttgtattaagttttacccgctcatggtggcataattccacccgcatcatcgcgccggccatgtttatcagtctgctttttggtatccttgacggcatcaaagcatctgcctttggcgatatgctgccagcctggagtcagcgtttgccgctggcggaacagggactggcgtggttgatgccaacggtggtgatggtgatcctggcgattatctgggatcgcgcggcgggtcggcaggtgacctccagcgctcactaaaatcgctgacatatgtgtacaccacggggcttaacgccccgtggttttttattgtgttgataggtcagaaattgatggaaagcaataataagctaaagcgtgggctgagcacccggcacattcgctttatggcattaggttcggcaatcggcaccggcctgttttacggctcggcggacgccatcaaaatggcggggccgagcgtgctgttggcctatattattggcggggtcgcggcatatatcattatgcgcgcattgggggaaatgtccgttcacaaccctgccgccagctcattttcgcgctatgcgcaggaaaacctcggcccgcttgcgggctacattaccggctggacctactgttttgagatcctgatcgtcgccattgccgacgtgaccgcgttcggcatttacatgggagtctggttccccgccgtgccgcactggatttgggtacttagcgtggtgctgatcatttgcgccatcaacctgatgagcgtcaaggtgttcggcgagctggagttttggttctccttcttcaaagtcgccaccattattatcatgattgtcgcgggtatcggcatcattgtgtggggaattggcaacggcgggcagccgaccggcattcataacctgtggagcaacggcggcttcttcagcaatggctggctgggaatgatcatgtcgctgcaaatggtgatgttcgcttacggcgggattgagattatcggtatcaccgccggggaagcgaaagacccggagaaatccattccgcgcgccattaactcagtaccgatgcgtatcctggtattttatgtcggcacgctgttcgtcattatgtctatctatccgtggaatcaggtcggcacaaacggcagcccatttgtgctgacgttccagcatatggggattacctttgccgccagcattctgaactttgtggtattgaccgcctcgctttccgctatcaactccgatgtgtttggcgtaggccgtatgctgcatggtatggcggagcaggggagcgcgccgaaagtctttgccaaaacgtcacgccgtggtattccgtgggttactgtgctggtgatgacgattgcgctgctgtttgcggtttacctgaactacatcatgccggaaaacgtcttcctggtgattgcctcgctggcgacgtttgcgacggtatgggtatggatcatgatcctgctgtcacaaatcgccttccgccgtcgtttaccgccggaagaggtaaaagcgctgaagtttaaggtgccgggcggtgtcgtaacgacgatagcgggtctgattttcctggtcttcattattgcgcttatcggctaccatccggatacccgcatctcactgtatgtgggcttcgcctggatagttctgctgttgattggctggatgtttaaacgccgtcgcgaccgtcaattggcgcaggcgtagtcgtttttctctgccttatccggtctgcagacaatggtaggccggataagcggagccgtttctcctcctggagtctcctcccctaataaacccctggatgatgagttatcctttaaatctctgtggcaaggtggccccattttcagtggaggggatacgagatgttgaatgcctggcacttaccggttgccccatttgtgaagcaacataacgataaattaaccattacgctgtggctgagcggagaaaatccgccgtctcgcgtgacgttgcgctcagaattcgataatgaagaaatctcactggcgatgcgcaaacagcgccgccagccgcagccgggcgtgacggcgtggcgagcgacgctcaatatcgcgttagggcagccccgtcgccgttacagctttaaattgctttggcacgaccgccagctttggtttacgccgcagggatttagctgctttccgcccgcgcgtctggaacaatttgcggttgatgtgccggatagcggcccgcagtgggtcgccgatcaaattttttatcagatcttcccggatcgttttgcccgcagccagtctcgtgaagccgggcaggataaggtgtattaccaccatgctgccggtcacgacatcgtgcgtaaagagtgggatgaaccgctcactccccaggcgggcggttccaccttttacggcggctgtctgaatggcatttgtgagaagctgccgtatctgaaaaaactgggtgtcacagcgctatatctgaatccggtatttaccgcgccgagcgtccataagtacgacacggaagattatcgccatgtcgatccgcaatttggcggcgatcgggcgctgctacgcctgcggcgtgaaacgcaagcacagggcatgaggctggtgctggatggcgtgtttaaccatagcggcgactcgcatgcgtggtttgacaggcataaccgcagcactggcggcgcgtgccatcacccggactcgccgtggcgtgactggtactccttttcaccacaaggcgtggcgctggactggctgggttatccgagcctgccgaaactcgattatcaatcagaaacgctggtcgatgagatctatcgcggtgaggacagtatcgttcgtcactggctaaaggctccgtggaatatggacggctggcggctggatgtcgtacatatgctgggcgaggcgggcggggcgcgtcataatttgcagcacgtcgccggtattacccgggcggcaaaagaggcgcagcccgaagcctatattgtgggggaacatttcggcgatgcgcggcagtggctacaggccgatgcggaagatgccgccatgaattatcgcggcttcaccttcccgctatggggatttctcgccaatactgatatcgcttacgaaccacagcatattgatgcccggacctgtatcgcgtggatggataactaccgcgccgggctgtcacatcagcaacaactgcgcatgtttaatcaactcgacagccatgatactgcgcgctttaaaaccctgctgggtaaagacgcggcgcgcctgccgctggcggtggtctggctgtttacctggcccggcgtgccatgtatttattacggcgatgaagtcggcgtggacggcgcaaatgaccctatgtgccgcaaaccattcccgtgggatgaacgcaagcaggacggcaacttgctggcgctgtaccagcgtatggcgaaactgcgccagagcagtctggcgctgcgtcgtggcggatgccaggcgctgtatgccgaaggtgacgtagtggtattcgtgcgagtttatcagcagcagcgggcgctggtggcgattaaccggggcgaggcctgtgaagtggcgctggaagcgttgccgttgctgaacgtggccggatggcaatgtaaaacgggaagcggtgacatccgcgagggaagacttagtttacccgcgatttccgcgacggtatggatgaatcgttgaggcgaggtggttcataatacctcacgcataaaaaaggctcgcattcgcgagccttttatcaatgcactgacttacaggctggaaatgttctcagccaggtatttagccacgccgtccggagaggcgttcatgccttctttgcctttttcccactgcgccgggcagacatcaccgtgctcttcgtggaactgcagcgcgtcgaccatacgcagcatttcgtcgatattacgacccagcggcagatcgtttacgacctggtggcgaacaataccgttagcgtcaatcaggaaagagccgcgcagcgcaacgccttcgtccgggtgttcgataccgtaagctttctgaatttcacgcttcacgtcggcgaccattgcgtatttcaccgggccaatgccgcctttatcgacaggggtgttacgccatgcgttgtgaacgaactcagagtcgaaagaaacgccgaccacttcaacgccgcgcttctggaattcttcataacgtttatcaaaggcgatcagctcagacgggcaaacaaaagtgaagtccatcggccagaagaacagaacggtcgttttaccattggtgtgttgtttgaagttgaatttatcaacaatctcaccgctacccagtaccgccgcagcggtgaaatccggggcctgacgagtaaccagtaccataataattctcctgcaatattaagggttttagaacgcaacgcgggcagtatagggagggcgaagcgacaaaacaatgcggtcttgacaatcaatgagacagcttttgcctatcgatcgggtcattataaatcgtaatgatgacccttttatgacagcgaacgatctttctgccaacggcggatctgacgcacgccctcgctatcaggccgtcacagcgctttgcgggcggcctgtgccatcatacgcggataaaaatgccagaagcgctcttctaacgcgtcgtagtgcgcgtccagatcgtaccaggaatcacgcaaggcatccagccggggacggcgattcgccatgccattcagcacgttttgaatgaaatccatatcgcgataccgctctaaccatttttctgaccaaagataatcattcaggttgacaaagcgcggcggggagtcgggcagaatcgtcgcgacctgcgcatgggcgtagccgacaaacgcctgaagtggaaaatcgggagagatttgcgtccagtgacgcgataaaaaatgatcccacatgacgtccagcgtaatgggcgccacgcgccgcgtttcatggcggaaccactctcgcgcctcacgaacttccggcaggttgtcggtcatgacgtcaatacgccgatgcatataaataccctctaccacgtcaggaggataatgcgttgccgggttaccgcggacaaaatcggccagaagattaccggaaagcgagctgtcggcaaggtgcgccagatgcaggtgagcaagaaaattcattattgattctctgtccaaaaagcgggtaacggttgcagcgggaacgccccggcactagactacccgcctcttattttagtctgagtcagagtcatgcgcgttaccgatttttcctttgaactacccgaatccctgattgcccactacccacagccggaacgcagtcgctgccgtttgctgtcattagaggggccgacgggcgcgctgacgcacggtactttcaccgatctgctcgataagctcaaccctggcgatttgctggtcttcaataatacccgcgtgatcccggcgcggctctttggccgtaaagccagcggcggcaagatagaagtgctggtcgaacgtatgctcgatgataaacgcatcctggcgcatattcgcgcttctaaagcgccaaaaccgggcacggaactgctactgggcgacgacgaaagtatccacgcgaccatgaccgcgcgtcacggcgctctgtttgaagttgagtttaatgacccgcgtccggtgctggatattcttaacgccatcggccatatgccgttgccgccgtacatcgaccgcccggacgaggacgccgaccgcgaactgtaccagacggtctacagtgaaaaaccgggcgccgtcgccgcgccgaccgcggggctgcactttgatgagccgctgctggcggcgcttcgtgagaaaggtatcgaaatggcgtttgttacgctacacgtaggcgcgggcactttccagccagtgcgtgtcgataccattgaagatcacatcatgcactccgaatatgctgaggtgccgcaggaggtggtcgacgcggtgctggcggcgaaagcgcgtggcaaccgggttatcgctgtcggcaccacctcggtacgctcactggagagcgcggcacaggcggcaaaaaacgatttgatagagccgttcttcggcgatacgcaaatctttatttatccaggttatcaatacaaagtgattgatgcgctgatcaccaactttcatctgccggaatcgacgttgattatgctggtttccgcatttgccggttatcaacacaccatgaatgcctataagactgcggtagaacaaaaatatcgcttttttagctacggggacgcgatgtttatcacgtacaatccgcaggctatttctgagcgtccgtaagaaggctatctcacttgccattttgacgccgggcagtgctcgccatcctcacgtactgcgtgtacgctccggtggctgtgcgctggtcgaccccaaactggctgcgccgatgacgccttcgggaatttattagctatggaatcattccgtagcgagtcgttaaacgtcggactgtttttctgacgcaggagtgataatgaaatttgagttagataccaccgatggtcgcgcgcgtcgcggtcgtctggtgtttgatcgtggcatagtggaaacgcctgcttttatgcctgtgggtacttacggtaccgtgaaaggcatgacgccggaagaagtggaagcgaccggcgcgcagattattctcggcaacactttccacctgtggctgcgcccgggtcaggagatcatgaagctgcatggcgatctgcacgattttatgcagtggaaagggccgattctcaccgattccggcggcttccaggtcttcagcctcggcgatattcgtaagattaccgagcaaggcgtgcacttccgtaacccgatcaacggtgatccgattttcctcgatccggaaaagtcgatggagatccagtacgatctcggttccgatatcgtgatgatctttgatgaatgtacgccgtacccggcagactgggactatgcgaaacgctcgatggagatgtcgttgcgttgggcgaagcgtagccgcgaccgttttgatagccttggcaataagaatgcgctttttggcatcattcagggcagcgtttacgaagatttacgcgatatctcggtgaaaggtctggtagagattggctttgatggctacgctgtcggcggtttggctgtcggtgagccgaaagcagatatgcaccgcattctggagcacgtttgcccgcagatcccggctgacaaaccgcgttacctgatgggcgtgggtaaaccggaagatctggtggaaggagtgcgtcgcggtattgatatgtttgactgtgtcatgccaacgcgaaatgcccgtaatggtcatctgtttgtgaccgacggcgtggtgaagattcgtaatgcaaagcataaaagcgacaccagcccgcttgacgccgagtgcgattgctacacctgtcgcaattattcacgcgcttacttgcatcatctcgaccgttgcaacgaaatattaggtgcgcgtctcaataccattcataacttgcgttactaccagcgtttgatggcgggtttacgcaaggctattgaagagggtaaattagagagcttcgtaaccgagttttaccaacgtcaggggcgacccgttccacctttgaacgttgattaattttaataatgagggaatttgaatgagcttttttatttctgatgcggtagcggcaacaggtgctccagcgcagggcagcccgatgtctctgattttaatgctggtggtgtttggtctgattttctatttcatgatcctgcgcccgcagcagaagcgcaccaaagagcacaaaaagctgatggactccattgcgaaaggtgatgaagttctgacgaatggcggtctggtcggtcgagtgaccaaagtagcggaagccggctacattgccatcgcgctgaatgacaccacggaagtggttatcaaacgtgacttcgtagctgccgttctgccgaaaggcaccatgaaggcgctgtaatatttcgttttcccaaagggaactgccgtgttaaaccgttatcctttgtggaagtacatcatgctggtcgtcgtgattatcgtcggcctgctttacgcacttcccaacctgtatggtgaggatccggctgttcaaatcactggcgtgcgcggcgtcgccgccagtgagcaaacgctgatccaggtccagaaaacgttacaagaagaaaaaattcccgctaagtctgtggcactggaagagggcgctattcttgcgcgcttcgacaccaccgatacccagctacgcgcccgtgaagcgctgatgagcgtgctgggggataaatatgtcgtggcgcttaaccttgcgccggctacgccgcgctggttggcggctattcacgccgatccgatgaagctcggtcttgatctgcgcggcggcgttcacttcctgatggaagtggatatggataccgcgttaggtaaactccaggaacaaaatatcgatagcctgcgcagcgatctgcgtgaaaaaggcattccttataccaccgttcgtaaagaaaataattatgggttgagcatcacgttccgtgacagcaaagcgcgtgatgaggcgatcgcctatctgacgccgcgtcatcgtgacctggtgatttccagccagagcggcaatcaacttcgcgcggtaatgaccgatgcgcgcctgagcgaagcgcgtgaatacgccgttcagcagaacattaatattctgcgtaaccgtgttaaccaactgggcgtcgcggagcctgtcgtacaacgccagggcgcagaccgtattgtggttgagctgccgggtatccaggataccgctcgcgcgaaagaaattctcggcgcgaccgcgacgctggaattccgtctggtgaataccaacgttgaccaggccgccgctgctgccgggcgcgtaccgggtgattccgaagtgaaacagacccgcgaaggtcagccggtggtattgtacaaacgcgtgatcctcaccggcgaccatatcaccgactcgacgtccagccaggatgaatataaccaaccgcaggttaacatctcgctggatagcgcaggcggcaatatcatgtctaacttcactaaggacaatatcggcaaaccgatggcgaccctgtttgtggagtataaagacagcggtaagaaagacgctaacggtcgcgccgtactggtgaaacaggaagaagtgattaacattgccaacatccagtcccggctgggtaacagcttccgtattactggtatcagcaacccgaacgaagcgcgtcagctctcgttgttgttgcgtgcgggcgccctgattgcgccgattcagatcgttgaagagcgcaccattggcccgactctgggtatgcagaacatcaagcagggcctggaagcctgtctggccggtctggtggtctccatcctgttcatgatcttcttctataagaagtttggtctgattgcgaccagcgcgttagtggctaacctggtgttgattgtcggtatcatgtcgctgttgccgggggcaacgctcagtatgccggggattgcgggtatcgtgttaacccttgcggtggcggtcgacgccaacgttctgattaacgaacgtatcaaagaagagttgagtaatggccgcacggtacagcaggcgataaacgaaggctatgccggcgcgttcagttccatcttcgatgcgaacatcacgacgctgattaaagtcatcattctgtatgccgttggtaccggggcaattaaagggttcgcgattacgaccggtatcggtgtggcgacgtcgatgtttaccgcgattatcggtacgcgtgctatcgtaaacctgctatatggcggcaagcgcgtcactaagctgtcaatctgaggagtgcgatgtggcacaggaatacactgttgaacaactaaaccacggccgtaaagtctatgactttatgcgctgggacttctgggcattcggcatctccgggctgttgctgatcgcggccattgtcattatgggcgtacgcgggtttaactgggggctggatttcaccggtggtacggtaattgaaatcacgctggaaaaaccggctgaaatggacgtgatgcgcgaagcgctgcaaaaagcgggctatgaagagccgcagttgcagaactttggcagcagtcacgacattatggtgcgtatgccgccaaccgaaggtgaaaccggcggtcaggtactgggtagcaaagtggtgacgatcattaatgaagccaccaaccagaacgcggccgtgaagcgtattgaattcgtggggccaagcgtgggcgccgatctggcgcaaaccggcgctatggcgctgctggtggcgttgatctctatcctcgtttatgtcggtttccgctttgagtggcgactggcggcaggggtggtcatcgcgctggcgcacgacgtgatcattacgctggggatactgtcgcttttccatatcgagattgacctgaccattgtggcatcgttgatgtcggtgatcggttactcgctgaacgacagtatcgtggtctccgaccgtattcgtgaaaacttccgcaaaatccgtcgcgggacgccttacgaaatctttaacgtgtcgctgacccagacgctacaccgtacgttgattacctccggtacgacgttagtggtaattctgatgctgtacctcttcggcggtccggtactggaaggcttctcgctgacgatgctgatcggtgtctctattggtacggcatcttctatctatgtcgcatcggcgctggcgctgaaactcggtatgaagcgcgagcatatgctgcagcagaaagtcgaaaaagaaggggcggatcagccgtccattctgccgtaaacacgtatttaagtgttatctgaatcccggtcatacgatcgggattttttttatgtaccatgacgataaacattactgacagtatgctgtcaggagccctgtcatacactcctcatgaattaatccacacacgcaggaggatgtatgaaaaacttgattaactggtttgaaattccagttactgatatggcgcgtgcaatcgccttttatgagcaagtgatgcagatatcgttacgtcgggaaaccatggatggggcggacctggccgtattcccgtatgctgaacccggacccggcggagcgctgataaagcaggatgatgtcgctccagttgcgcagggagtcgttatttatctgcataccgccgatttgttagcctcgattgaacgtgtcgtccttgctggtggcaagtgtgttctggaacccatggttcccggagatgacattggaaccatcgcgttgtttattgacagcgaaggtaaccgaataggtttacatcaacctgcgtgatatttgctaaatgtagagagtcaatatgaccagacgcgctgaccgtttgtttcagatcgtgcaaattttgcggggtagacgactgacgacggcagcgctgttggcacagcggcttgcggtttctgaacggacgatttatcgcgatattcgcgatctgtcgttatccggtgtgcctgtcgaaggtgaagcggggagcggataccgtttaatggcgggttttgatctgccgcccttgatgcttacccatcgtgaatcggaagcactgatggtggctatacggttattgaaaacctggggcggcgattcgctatcgcgcgagcttgaatccgcccaggaaaaagtgttggctattttaccggaagagagccgtcgtaaagcggagcagacacggatttacgctccggatttgggtacatctccacattcgcgcagcgcgtttgatcttatccatcaggccgtttcggcgcagcaggtgttggcgctacattatcgtgatgaagcggggcatctctcttcgcgggatatacaacctctgggattgtttttctggggagagcactggctactggttgcctggtgtgagagacgggaagactatcggtgttttcgcctcgatcgctgtttacaaattactccgcttaaccggcgatttcgtgaaacaatcgaccgttctttgcgtgattttttgcgtaaagttgagcacgaaaaaatgccgtaagatgtgatagcgataactccaacgcttgtaaaacgggttgattggtcatcagtttgcctgaaatagccttccttacctggatatataagttgcacagaatcattgctaaaagcccggcttcgcgggaaactgcgcataaccctttgtattattcaggtacctgttgattatggctatcatccccaaaaactatgcgcgcctggaaagcggctatcgtgaaaaagcgctgaagctgtttccgtgggtatgcggacgttgttcccgtgagtttgtgtattcaaatctgcgtgagctgacggtgcatcatatcgatcatgaccacaccaataatccggaagacggcagcaactgggagctattgtgcctctactgccacgatcatgagcattctaaatataccgaagccgatcagtacggttcgacggtcattgccggggaagatgcgcaaaaagatgtcggcgaggcgacttataacccgtttgccgatctgaaagcgatgatgaacaaaaagaaataagcaggctgctgacaaagttgttggtgctgttgaatgttaggttacgcttcgctccacccaacggaatccgcaatataaatgaactattggttttcgtagatcggatgcaatccgacattttttcagccccggagtttgtcgccagccccaaacgtcctgtaacgcatacattgtcactggaatcccgatcgcaaggttgggatttttttgtttttaagtcctgccgatactggcgagcagagtagaatcagcggtaagccggggcaacccggtgaggcgcaatgttgcgggggcttgatccccggtggccttgtcgctggaaagagaaaacccccgcacattgttcggtattcaccggcaacattacgggggctaacttgaccctagacaagttgaggatagccgcgaaccgttgccattgcaacaaaggcggcaatatgacgctcacagagttgagcattactatctggcacgatctggcggcaccaacgctggtcgggattgcgacaggtctgtttttaggctggtggcatcgccggaagtaatgtgaagtgggcgcgactcgccgccgcatggcagcatgcgcccgaaacgggccagaagacgacctctggccttttttgcaggtttagaagttgtaacccacgaccaggtagccgccccagccggtagatttcgcgctgaaatcgccgtcgccccagttcagttttgcgccattctgccactgtccgccgttatggaagtaacgcgcaacgaccgagtagtgccagtgatcgtagttcagcgccaggatatggctggaagcgatggagttgctggtacggttcggatcgtcgcctaaatcagatccccagtcaaagttggtaaagccgatatagctcagtttaccgccccacagatcggtgatggggacgaagtatttcactttgaaacggtagccgtcccattcgttttcattggacgcgccgtagttttgccactgatatttcgcatacacgttcagcgacagacccatcggcaggcctgtgtcgatatcggtccccagacccatataccatgtgctctggcggctggctttgttatcgcccatatcgtagatgtagttgttggcgaaataccactctttaaacgggccgaagctcaggtctgcgccggtcagcttatcaatcgagaaacgcggttcgatttccatgaacagcggagaaccgtcggaccagatacctttatcgttgccgttaccccaatcaaaggttttgggaatatcgatatagccgtagaaatcaaaccagtcttttttggcaaatgcttcatattccagatagacgtcgttgttcaatttcggcgagaaacgggtatggtagctgcctaccacgtttacgctctggtgccaccagtcggacaaatactgcggctgatcattttctgctgcgttagcagtaaaagatgaggtgagcgccagcgctgcgctgactgcgagtaaagtttttttcatatgtatgccactgtttgaaatcccttgcgggagtgaaaagaacgcaatttgcgtttctaaatatttcgtgtttctgcggagcctattataaaaatcattgctcacaaaaatatgtcttgtttcacatatctatcatttacgtaatcgattgcgttcacgtttgcgcattttagacgcggcgacagtactatctttcatgaatattaccaatccatgtcataaatgacggaaatgtcagtagggcaacaaaagtcgcgcgggggatgttgcggaacgcacaaaacgctccgccagaacgtttattgattaacaggctgaatatcatggatgcgaatgaagcctaactgcgccggtgtgatccccttcaacggtaacgaaatattgacatcactgggcgccagcaagctggcaggggcatttaccagaaggctctgtgcattcacctcctgatagttctccgtagtgccctgaagttgcccgtactctacggtagcgctgaatgccggcagcggatcgcgggactcgccctgaatgtgtaacgttgcgtgagcgccgtctgcgacaggcgtaatttccagcaatgtcatacgtagcgtaccgatctggctctccagccgggcaggcgtattggcgccaggcaacaaatagacgccgcgggttgactccgcattcagcttattttgttgggtaatttttaccgtttcctgattcagttgggtcatctctttattcagggtgctaatgctttgatgcatctggcgaacttcgctctgcggcgcgcaggcggtcaggctcaagagacttcccaccaggagaattcttaggtaacgtcttgtcatgtcgatgatttccttcgtggtccgatagcgtaatggtagtgcgctatacgcacaaaggcaccgatcctttatctcaaaagcgctccgcctttgttgtcgcgccagttcagggtaaaatagtgttttctaaatcatctggtcaggacgccgtatgcattgcccattttgtttcgccgtagataccaaagtcattgactctcgtcttgtaggcgagggctcgtccgtgcgccgccgtcggcagtgtctggtgtgtaatgaacgctttacgacctttgaagtggctgaactggtcatgccgcgcgtgataaaaagcaacgatgtgcgcgaaccctttaatgaggataagctgcgtagcggcatgttgagagcgctggaaaaaagacccgtcagcgcagatgatgttgaaatggcattgaaccatattaagtcacaattacgtgccactggggagcgtgaagttcccagcaagatgattggcaacctggtcatggagcagctgaaaaaactcgataaagtcgcgtatattcgctttgcctccgtctatcgcagtttcgaagatatcaaagactttggcgaagaaatcgctcgcctacaggactaagccatgcaggatgagttttacatggcgcgagcgctcaaactggcgcagcgtggacgtttcaccactcacccgaaccctaatgtcggctgtgtcattgttaacaatggcgacatcgtcggcgaaggttatcaccagcgcgccggagagccgcacgccgaggtccatgcgctgcggatggcgggcgcaaaagccaaaggcgcaaccgcctatgtcacgcttgaaccctgtagccatcatgggcgaacgccgccatgttgcgatgcgctgattgcggctggcgtcgcgcgcgtggtcgccgcgatgcaggacccgaacccacaggtcgccgggcgcggactgtatcgcctgcaacaggcgggtattgcggtcagccacgggttaatgatgagtgaagcggaggcgctcaataaaggcttcctcaaacggatgcgtaccggattcccttatcttcagcttaaactgggcgcctccgtcgacggacggacggcgatggccagcggcgaaagccagtggatcacctcgccgcaggcccggcgcgacgttcagcgcttgcgtgcgcaaagtcacgctatcttaaccagtagcgcgacggtattggctgacgatccggccttgacggtgcgttgggcggagttagacgcctctacgcaggcgtcttacccgcaggaaaatctgcgccagccggtgcgaattgttatcgacagccaaaaccgggtaacgcctgcgcatcgtattgtgcagcagcctggcgaaacgtggattgcgcgtacccaggaagatagccgcgcgtggcccgattcggttcgtactatcagcgtgccggcgcacaacggacatttggatctggttgtgctgatgatgcagttaggcaggcagcagattaatagcatatgggttgaagccggaccgggactggcgggcgcgttgctgcaagccgggctggtggatgaactgattgtctatgtcgcgcctaaattgttgggaacccaggcgcggggattatgcgaattgccggggcttgagaagctcgccgacgcgccgcaatttaccttcagcgaaatacgtcatgtcggcccggatgtttgcctgcatatggtgagcgcatgagttctcccgtcgaaaggggagcagcgctcaaattattatgataaaatccgcccccctgcggggccaaatgaaccctggaagagagaatatgaacattattaaagctaacgttgcagcccctgacgctcgtgtcgccatcactattgcgcgtttcaatcagtttatcaacgacagcctgctggatggcgcggttgatgccctgacgcgtattggtcaggtaaaagatgataatattaccgtagtgtgggtgcctggcgcctatgaactgccgctggcgaccgaagcgctggcgaaaagcggtaaatacgacgccgtggttgcgctgggaaccgtgattcgcggggggactgcgcactttgaatatgtggcaggcggcgccagcaatggcctggcaagcgttgcccaggacagcggcgtgccggtagcctttggtgttctgaccaccgagagtattgaacaagccatcgaacgtgctggtacaaaagccggtaataaaggcgcagaagctgcgctgaccgcgcttgaaatgattaatgtattgaaagccattaaggcctgattttttgtaaggggaattccgtgaaacctgctgctcgtcgccgcgcccgtgagtgtgccgtccaggcgctttactcctggcagttgtcccagaacgacatcgctgatgttgaataccagttcctggcggaacaggacgtaaaagacgtcgacgttctctatttccgtgaactgctatccggggtggcgactaacagcgcgtacctggatggtttaatgaaaccgtatctgtcccgcctgcttgaagagctgggacaggttgaaaaagccgtgctgcgtattgcgttgtttgagctgtcaaaacgcagcgatgtgccttataaagtggccatcaacgaagcgattgaactggcgaaaacctttggcgctgaagacagccacaaattcgtcaacggcgtactggataaagcagctccggtgattcgtcccaacaaaaagtgattcacaggccggaaagatagcgggcgatcgatacccgccgtctccggccttttctttttttctgctgaggcataacgtatggcatgtggcgagttttccctgattgcccgttattttgaccgtgtaaaaagctctcgtcttgatgttgaaaccggtattggcgacgattgcgcgctcctgaatattcctgaaaaacagaccctggcgatcagtaccgatacgctggtggcgggcatccatttcttacccgatatcgatcctgccgatctggcgtataaagcgctggcggtgaatttaagcgatctggcggcgatgggcgccgatccggcatggttaacgctggcgctcacgcttcctgacgtcgatgaggcgtggcttgccgcgttcagcgacagcctgtttgaacaactggattactacgacatgcagctcattggcggcgataccacgcgcggcccgctgtcgatgacgctaggtattcatggccttgtgccagtcggtcgggcgttgaaacgttctggcgcaaaaccgggcgactggatttatgttactggcacgttgggcgatagcgctgccgggctggcgattctacggggtgattttcgcgtgggaagctggggggatgccgactatctggtcaaacgccatctgcgcccgacgccgcgtattttacaagggcaggcgctacgcgatctcgccagttcagcgatcgatctttccgacggtttgatctccgatcttggtcacattctgcaagccagcaactgcggcgcgcgaatcgatttggaggcgctgcctgactccgaagaactgtggggacatgccaatgatcccgaacaaaagcttcgctggatgttatccggcggcgaagattatgaactgtgctttaccgtcccggagctgaaccgtggcgcgctggatgtcgcgcttggtcatctgggcgtgccgtttacctgtatcgggcaaatgacggcggatatcgaagggatcgcctttgtgcgtgacggagaacctgtcacttttgactggaaaggatatgaccattttgccacgccataaagatgttgcgaaaagtcgcctgaatttgcgcaatccgtggcacctgctcgctaccggctttggcagcgggctgagccccgtggtgccgggcacgatgggctcgctggcggcgatccccttctggtatttgatgacgtttctgccgtggcagctttattcgctggtcgtgatgtttgggatctgcattggcgtttatctttgccatcagacggcgaaagatatgggcgtacacgaccacggcagtattgtctgggatgaatttatcggtatgtggataacgctgatggcgttgccgacgacggactggcagtgggtggctgccgggttcgttattttccgcattctggatatgtggaaaccctggccgatccgttggtttgatcgcaacgtgcacggcggcatgggaattatgatcgatgatatcgtcgccggcgtgatatccgccggcatactgtattttatcggtcatcactggccgctcggtattatttaaagggtttgccggatggcggcgtaaacgccttatccggcctatccccgaacaatatgtcgatttcgcaggcccgataagcgccgcgccatcgggcaatggcagattatttaaatcccaccaccggatgctgtttgtacggcgtttcgagttcagcaatctgctccggtttgagcgttaaatcaacggcattcagcaactcatctaactgctcttcacgcgaagcgccgataatcggcgcggcgacgcctcgtttactgagtagccaggccagcgcgacctgcgctcgcgttgcgccaagcgccttgctgacgccagccagccgttccgctatttgcgcatcatttttatcgctttcagcgtataaatttttgcccacgtcatccgagaccagccgggccgtggtttctccccaggggcgagttaagcgcccgcgcgccagcggactccacggaatcacggcgacgccttcctgccagcacagcggtagcatctcacgctcttcctcgcggtagatcaggttatagtgatcctgcatggtgacaaacggcgcccagccgtgttgtttttgtagcgccagcgcttgggcaaattgtgaggcgtgcattgaggaagcgccgatatagcgggctttacccgccttcaccacgtcgtttagcgcttccagagtctcttctatcggcgtggtgtaatcccagcggtggatttgcaggatatcgacatactccattcccagacgggtgaggctatcgtcaatagagcgcaggatttgcgcgcgggacaatccttccggcagatcgccgacgcgatggaagactttcgtcgctaccaccacctcgtcgcgccgggcgaaatcacgcagcgcgcggccgacaatctcttcgctgctgccgtcggagtagctgttggcggtatcaaaaaagttaatgccgccctcaagggcgcgcttgatgatgggacggctgctctcttcgggaagcgtccaggcgtgattgccgcgactcggctcgccgaatgtcatacagcccagacaaaggcgggacacccgaagatcggtatttcctaacgtgttgtattgcatgactccgctcctgttatacccgtcactcttcaagcatagcaggagcaaagaggagattatgccagccaggccttgattttggcttcaatgcctgcggcgtcaagccccagttccgcgcgggcttcttcctgcgttccttgcgggataaagaaatccggaagaccgatattcagcacaggtacaggtttacgatgggccattagcacttcgtttacgccgctgccagcgccgcccataatggcgttctcttccagcgtcaccagcgcgtcatgctgcgcggccatctccagaattagcgtgtcgtccagcggcttaacaaagcgcatgtcgaccagcgtggcgttcagcgcttcggcgactttcgccgcctcaggcattaaggtgccaaagttcagaatcgccagtttttcgccatgacgcttcacaaggcctttaccaataggcagtttttccagcggggttagcgccacgccctgcgcattaccgcgtggataacgtactgccgtcgggccgtcgttatagtgatacccggtaaataacatctggcgacattcgttttcgtcgcttggcgtcatgatcaccatatccgggatgcagcgcagataggagagatcgaacgcgccctggtgtgtttgcccatccgcgccaacgataccggcgcgatcgatggcgaacatgaccggcagtttctggatagcgacgtcatggatgacctgatcgtaggcgcgttgcaggaaagtagagtagatcgccacgacgggcttatagccgccaatcgccagacctgcggcgaaggtgacggcatgctgctcggcgatggcgacgtcaaaatagcgatccgggaatttacgtgaaaattccaccatgccggaaccttcgcgcattgccggggtgatcgccatcagcttgctgtctttggcggcagtttcacacagccagtcaccgaagatttttgaatagcctggcagaccgccgctgcttttcggcaaacatccgctggaaggatcaaatttaggcaccgcatggaaagtgatcggatctttttccgcgggctcatagccgcggcctttcttggtcatgatatgcaggaactgcgggcctttcaggtcgcgcatgttcttcaatgtgctgataagccccatgacatcgtgaccatcgaccggcccgatgtagttaaagcccagctcttcgaacagtgtgcccggcacaaccatgcctttaatatgttcttcggtacgcttgagcagttctttaattggcggtacgccggagaagaccttttttccgccttcgcgcagagaagagtaaagtttaccggaaagtagctgcgccagatggttgttgagcgcgccgacgttttccgaaatcgacatttcattgtcgttcagaatgaccagcatgtcgggtcggatatcgcctgcgtgattcattgcttcaaacgccataccggcggtgatggcgccgtcgccaatcacacagacggtgcggcgatctttgccttctttctccgccgccacggcaataccgataccggcgctgatggaggtggaggaatgcccaacgctcagcacatcgtattcgctttctccgcgccacgggaacggatgcagaccgcctttctggcgaatggtgccgattttgtcgcgacgaccggtaaggattttatgtggataagcctggtgaccaacatcccagattagctggtcaaacggggtgttgtagacataatgcagcgccacggtaagttctaccgtgcccagcccggaagcgaagtgcccgctggaacggcttacgctgtcgagtaagtagcggcgtagctcgtcgcagagtttcggcagactctctttcggtaacagtcgtaactcctgggtggagtcgaccaatgccagggtagggtatttggctatatcaaaactcatcgcaagctcattggatatggggtttatttatcacgctggattatgtagttcgctagcgcttccagtgccgaggtgtccagtgattgcgcggccagctgatgtaacgactgacgggcgtcctctatcaggtcccgggctttattccgggcttgctcaagacccagaagtgcagggtaggtacttttgccaagctgctggtctgcgccctgacgtttacctaacgttgcagtatcgcccaccacatccagaatgtcatcctgaacctggaaggcaaggccgatactctctgcatagcggtcaagtatcggcagagtattccgtcctttatcgcccgcgctcaacgcgccaagtctaacggcggcgcgaatgagcgcgccggtcttatggcgatgaatacgttccagcgcgtccagagtgatccgctggccttctgccgccagatccaatgcctgaccgccgcacataccggcgatgccgctggcgttcgccagttcggcgatcatcgcgatacgatcgcgatcggtgacttccggcatcggcgcgtcgctgagaatggcaaacgccagcgtttgcaacgcgtctcccgccaggattgcgttggcttcgccaaatttaatatggcaagtcggcaggccgcgacgcaaatcgtcatcgtccattgctggcaggtcgtcatggatcagcgaataggcatgaatgcattcgaccgccgcagctggcgcatccagcgttgccgtactgacgccaaacatttgaccggtggcgtaaaccagaaatggccgcaggcgtttaccgcctaataatgcgccatactgcatggcttcgaccacgggagtgttctgaaagggcagtggcgcgataaaacggctcagcgcctgattcgcttgcgttacgcaagcctgtagctgctgcgtaaagtccatttactcattatccgcgataaaaggctcaggtgaagcctcttcattatcagacagcaaaatttgcacgcgctgttccgcctgctgcagttttgcctgcccctgacgcgccagttgtacgccgcgctcgaattcattcagcgcgtcttccagcggcaaatcgccgctttccaggcgggtaacaatatgttccagctcgctcagcgcagtttcaaagctggcgggcgcctcatttttcttcggcatgatgactgtttgactctctgtaatggcagcacaagtctatggtaacggactcacactgataagcaaataacgcgcaatggtaaggggaaatgcgcaagatgtccgtgatagtgatatacttccgcgcctggatgcagccgtaggtatgggctgctatactatttctccacgacaagccttagatagcttgctaaagaaccattgccgccatgaagtttatcattaaattgttcccggaaatcactatcaaaagccaatctgtgcgtttgcgctttataaaaattttaaccgggaacatccgtaacgttttaaagcactacgatgagaccctcgcggttgtccgtcactgggataacattgaagttcgcgccaaagatgaaaaccagcgtctggcgattcgcgacgcgctgacccgcatcccggggattcaccatattcttgaagtcgaagatgtgccgttcaccgatatgcacgacattttcgagaaagcgttggcgcagtatcgcgaacagcttgaaggcaaaaccttctgcgtgcgggtaaaacgtcgcggtaagcatgagtttagctccattgaagtggagcgctatgttggcggcggattaaatcagcatattgaatcggcgcgcgtgaagctcactaacccggatgtgacggtgcatctggaagtggaagatgatcgcctgctgctgatcaaagggcgttatgaaggtattggcggtttcccgattggcacccaggaagatgtgctgtcgctgatctccggcggttttgactccggcgtctccagctatatgctgatgcgtcgcggctgtcgcgtacactactgcttctttaaccttggcggcgcggcgcatgaaatcggcgttcgccaggtggcgcattacctgtggaaccgctttggcagctcccatcgcgtgcgttttgtggcgattaacttcgaaccggtggtcggcgagattctggagaaagttgacgacggccagatgggcgtggtgctcaaacgtatgatggtacgcgcggcgtcgaaagtggcggaacgttacggcgtacaggcgctggtgaccggcgaagcgctgggccaggtatccagccagacgctaaccaacttgcgcttgatcgataacgtgtctgacacgctgatcctgcgcccgctgatctcttacgataaagagcacattatcaacctggcgcgccagattggtacggaagattttgcccgtacgatgccggaatactgtggcgtgatttcaaaaagtccgacggtgaaagccattaaagcgaaaattgaagccgaagaagaaaatttcgacttcagtattctcgataaggtggtagaagaagcgaacaacgtcgatattcgtgaaatcgcccagcagacccagcaggaggtggtggaagtagaaaccgtgagcggtttcggcccgaacgacgtgattctggatatccgttctgtggatgagcaggatgacaagccgctgaaagtggaaggtgtggacgtcgtttcgctgccgttctacaagctgagcactaaatttggcgacctcgatcagagcaaaacctggctgctgtggtgcgaacgcggggtaatgagccgcctgcaggcgctctatctgcgcgagcagggctttgaaaacgtgaaagtgtatcgtccgtaattcctttgccgggtggcggctatgtcctacccggcctaccgttttatttctgccccaaccgttttgcaatgcgctccagcttcatcatcagcagcagcgtaatggccaccagcacaatagtcagcgccgcgccgtcggcaatatttccacggtcggtcaggctaaagatagctaccggcagcgtcgtccagcccggcggataaatcatcatcgtcgcgcccaactcccccatggagagcgataaactcagcgccagcgctgacaccatccacggcatcaataacggcaacgtcacgtgacgcagacgataccagggcgatgcccccagactcgacgcgacgttttcaatatcggcggaaatgcgcgccagtccggtcgacacgttactgaaggtaaaggcggaaatcagcacaaagtgcgctgtcagcacaatccatagggtgccgttcatttgcaatggcacctggctgaaagcaaccagaatgcccagacccacggacactgacggaatcgcactcggcagatagaacaccatacttaaccatttctgcgttttcaccccatattgacgcagcgccagcgccgcccaaacgccgcaaagcagcgcaaacaggctggcgcaaaagccaatcgtgaggctggcaagtagggcatcccatgccgcaccgtgcagagcgttaacaaagtggttcagcgtgaagccactcggcagaataccgttccactgctggctaaggctggacattagaatcaccgccagcggcaggaaaaagaacacgataaacagtacgctagccacaacgcccgccgctgcgcgtcctttaggtgaccaaattagcatggctggctccttacgccggtacgcgatgccgccaggcgatagagggagaacagccccagcgacaagacaatgttaatcaacgcaatcatgcaggcgaccgtatagtcggactccagaatcgctttgctgtaaaccatcatcggcagggtgttaacccctttcgcgccaataaacagtacgatgccaaactcgttagtggtcaacagcaggcacaggctgccaccagccatcagcgccggtagcgccgccgggaaaatcacctgcccaatcacccgtaacgggtgcgcccccagaatgctggctgcctctagctggcttttatcaatttgccgcagcgcggccatcagtggccgcatcaccagcggagtgaacaccgtgatctccgccagaatgacgccctgcatcgagtagagaaaatccaccggcggtagctcaaaggcaaacaggctcatcagcgtaccgttgagcagacccgctgacccataaataaaggtgaacgccaccgtaatcaggaaggtcggcagcgcaataaaagtatcgacgacccgaccaatcaactcgctgccggggaaaggaataaacaccagaatcagcgacatcacgctgcccagcagcaggcaaccggcggtggcgaaaaaggcgatttgcaacgtgttcagcaacgcgccgacaaagcgtttcgagtcgaccacctggcggaaggtctcgagcccgatctcgccattagcaccgcgtagcgcctgttcaacgatgagcgacagaggccagaaaaacagcgtcgccagcaccagcaacgggagcagcagccacagcagtgggcgtaggttaagcgccggtttttccagaggtaaaatgagtgacatggttatacctcaatcaggaccgcatcatccggttcgaaccacagcgccagcttgtcgcccacgcgcggcagcggattgacatgcgtcaacaccattcgcaccgtttcgccagcaacgtcacacagcagatgggttaaatcgccctgccagtgcaccgattgcagtgtggcgttgaagcggttgctgtaggccgaacgcggcgtcaggctgaggtgctgaggacgaatgcacagcagtttgttgtaaccgtggtggctgccccggctgaacgcgcgaatcaccgcaccgccgcagctgacgtccaccagccccggagcctccgttatccccagcgcgatggcggagagaatattggcgcgacctaagaattcggcggcaaaacgattgggcggatgctgatatagcgcgcgggtttcgccgtgagcaatcagcgagccatccttcataatgccgattttatcggccagggtgagcgcttccgtttgatcgtgggtgacgtagagaatagtgagctccggcagctcacggtgaagacaggcgatttcttccaccatattatgacgaatctgtgcgtccagcgctgacagtggttcatccagcaacagcacgcgcgggcgcacggcaatcgcgcgggcgatggccacgcgttgctgctggccgccggaaagttgatgcggataacgggcggcgtaatcactcatgccaaccgttttcagcgcctgcgttacacgctcattaattagcgcctttggctgcttctgcgcacgcaggccaaaagcgacgttgtcttccactttcagatgcgggaacaaggcgtagttctgcaccaccatcgccaacccgcgtttatagggtggcagatgggtgacgtccgtatcgccaatcagaatacgaccgcctgcaggttgcacaaagcccgcaaccgcacgcagcaccgtcgtttttccagatcctgatgggccaatcagcgccagcacttcgccaagttcaatcgtcaaagagagcggtttaagcaccacgttgccgtgatacgcaacgcgcagcgagtcgaggactatccccgatgtcccctgcgatgcagggacgtgaacggcagtcgttttcatcagcatcaggcttactcgctttcggtcactttgtgccaacggctaatatctgccgacagcgaaacggctacgtcatcccaatttggctgccagctctgcacgccttctaacgcggcagtggcggccttgtaatgttcgtcgctcggcgtcacgtcgctgcgtactggcattccccaggagagttcgctgacgcgagtctgcgcttctttactcagcaggaagttaatcagctttttaccattttcactctgcggcgccccctggaccaggccaatgacataagggatggccagcgcgctgcgctcgcctttgtcgttggccggccagaagattttcacgttcgggttacgttccatctgcgcgaggttcatttgcaggtcgccgttagcgacgtagatttcacctttattaaccagcgcggttagcttgccggtagaggcagatggcccgacgttattggcctgcagcttgccgagatacgcaaaaccggcatctttactgccgaagctgtggaaagcctgcagcatcaccgccgtgccgtcagcggcctgacctggcgtggaatactggagtttatttttgaatttaccgtcaagcagatcctgccagctcgccggggcagttttcagcagcttgctgttgtagataaagctcagatagttctttaccagcggcgaataaaggttgttggcatcggggatagccgatgcggcgtcggtgttaaagttcgccagcagcttttcggcggcggcgcgctgaatgaatggcggcgcggttaccagcacgtcggcctgtggattcgtgcgctcttttgccagacgttccactaccacgccaccaccgccttcaacatagcgtacggtaatgccggtcgctttggtgaatgcgtcaaactgcacctggtaccagctgttatcgccatcgtgcagcccgtcgatggagtacaccgtgaccaccgattccgcccatgacggggcgctggcgagagcgaagacagacagcagagcaagtcgggaaagtttcatcgtaatagcctcatagcgtacgttgcattttctggcctataccaggtttgctttttacgctaaacggcttatatgacaaaacgatgaaagagaaataaatcagtccacgccggatgatgctgcgtttatccggatagccgtgagacgatacgattggtaggccggataagtcccgcagccaacatccggcgcatccgctagtgggtatctacctcaatacgcaggctgtcgtgacgccagtattcgatatccagatccagcactcgcccgtgttgatcgtagttcaggcggcgcagtaacagcgccgggcgtccttccataactcccagcgcctgtgcggcctgcgcaggcatggcggtggggtagaacgacagatgcatgctggtatagacgaggttgtagtgcgactcgtatacctcggtcaggctgccgttgagatcgtactgcagcagctcaggcacgcgggcgggcaaacaatggttttcgcagtagcacacggcgcggccatcggcgtaacgcagacgggtcagcagatagatttgatcaaacggctggagctggaggggctccatgacctcgacaggcacggtggttaacacgccgctcagtagcgcggtttttggctcccgcccctgctcgcggcaaagcttatggaagttggtgttctgggtcggatccagccacaggcgttccggcgtaacgaaccaaccgcgacgatcggcgcgccagataagcccactggactccagctgtgccagactttcgcgaatagtaatgcgcgtggtgttgaagatcgcgcacagttcgcgttcagacggcagtttatcaccgcttttcaacgcaccgctctgaatacgtgcctgaagctgtgccttgatcaacaggtactgcgggatatcgcccgggatagatttcatgcttactcgcttccgttttgcctgccgccattatacaagcagagatgaattttttgttgcagcgcgattttctctttgacccgtcgcggcaaagatcgtcatgataaatgcaatctggtatagaccaaaggtaaataacatgacttcgcgtaactatctgttgctgactcctggcccgctcaccacctctcgtaccgtgaaagaagcgatgttgttcgatagctgtacctgggatgatgattacaatatcggcgtggtggaacagatccgccagcagctgaccgaactggcaacggcctccgaaggctacacctccgtactactgcaaggcagcggcagctatgctgtggaagccgtactgggcagcgcattgggtccgcaggataaggtgctgatcgtcagcaacggtgcatacggcgcacgaatggtcgagatggccggccttatgggtatcgcccatcacgcttacgactgcggcgaagttgcgcgcccggacgtgcaggcgatcgacgcgatcctcaacgccgacccgacgatcagccatatcgccatggtgcatagcgaaacgaccaccgggatgctcaaccccattgatgaggtgggcactctggcgcatcgctatggcaaaacctacatcgttgacgccatgagtagcttcggcggcatccccatggatattgcagcattacacatcgactatctgatcagctccgccaataaatgcattcagggcgtgccgggttttgccttcgtgattgcccgcgagcaaaaactggccgcgtgcaaagggcgttcccgctcgctgtcgttagatctctacgcccagtggcgttgcatggaggataaccacggcaaatggcgttttacttcgcccacacataccgtcctggcgtttgcacaggcgctgaaagagctggcgaaagaaggtggcgtggcggcacgtcatcaacgctatcagcaaaatcagcgcagcctggtggccggaatgcgggcgctgggctttaacacgctgctggatgacgagcttcattcgcccattatcaccgccttttattcaccggaagacccgcagtatcgctttagcgaattttatcgccgcctcaaagagcagggctttgttatctatcctggcaaagtgtcgcaaagcgactgcttccgcatcggcaacattggcgaagtatatgccgccgatatcactgccctgctgaccgccattcgtaccgccatgtactggacgaaataaggaaccatgatgaaccgtattcacgctgttattctcgactgggcgggcaccaccgtcgattttggctccttcgcgccgacgcaaattttcgtcgaggcgttccgtcaggcatttgatgtggagatcaccctcgccgaagcacgcgtgccaatggggctgggtaaatggcaacacattgaagcgctgggaaaattacctgctgttgacgcgcgctggcaggcaaagtttggtcgctccatgagcgcagcagatattgatgccatctacgccgctttcatgccgttacagattgctaaagttgtcgatttttcttctcctattgccggagttatcgacacgatcgcggcgctacgagccgagggcatcaagataggctcctgctccggttacccacgagcggtgatggagcgcctggttcccgccgccgccgagcatggctatcgtccggatcattgggtagcaacggacgacctggccgcgggtggtcgcccggggccgtggatggcgctgcaaaacgtgattgcgctgggcattgatgcggtcgcgcactgcgtgaaggtagatgatgccgcgccgggcattagcgaggggcttaacgcggggatgtggacggtggggctggcggtatcgggtaacgaattcggcgcaacatgggacgcctatcagacaatgtcgaaagaggacgttgcggtccgccgcgagcacgcggccagcaagctgtacgccgccggggcgcattacgtggtggattcactggcggatttatctggggtgattgcgcatattaatgcgcgtctggcgcagggcgaacgcccgtaaaataactgccggatggcgctgccgcttattcggcctacagactgtaccgttttgtaggccggataaggtgtttacgccgccatccggcaatcattcttattcgtagtagttataaatccccgccgccatcaccagttgcgaagccacttcatgcgctttttcacgaccaaccaacaggtcgatgattttcaagccaaaatcgatagcggtacccggtccctggctggttaataattttacccgcgcatcccacaccacacgcttatcctgccactgttcggcggggatcttatctttcagcgccggaaaaccggtcatattgccgatagggaagatatcgtgcggcacgagcactgtagcggctgcggcgcaaatggctgcgacaatacgcccggagcggtgaaactgttttacggtttcgaccagcagcgggctgtcgcgaaagcactcggcgcctttaattccgccgggcaacacgatgatgtcataatcgccgtcggcaacttcaaccagcggcgcatccgccagcagcttcacgccgcgcgagcagacaatcgtcaggttgccatcgctggcgacgctggcggtagtgacgtggattccgccgcgaaccagcagatcgatagtggtgaccgcttcggtctcttcactaccaggggcgaggcataccagtgcctgagcgctcatactcactctcctttcgctttaccatttcaaacaggcggctattttccggaacggcgagaccgtgcacgcgggcgcgcttgagtaaataaccggtgatgtagtcaatttcggtatggcgcatggcgcgcacgtcctgcaacatggatgagatgttttctgccgtactgtcaatcacttgctcaacataatagcgtaaatcgtctgccgatgtgtggtagccttcacgttcaatcacggcggcgacctcttcgcaaatcgcgttgatttcatcagtatgatggcgcagctcgccgttcgggcagttccaaagcgcggtgagcgggttgataacacagttgaccgccagtttgcgccacatctctgcgcggatattgttatgccaggcgacatcgggcagtaccccctgcaggatatcggcgagataactgtaatcgccgtcttgctcgcgtgccgggccaatatgcgtagtaccgttagcgacatgaataatgatattaccgtcgcggcgcgcagcatgggtgatagtccccatcaacatcggctgttggatattttgcagttcttctatggttcccattccattatgaatgagcagaataggcgacgtcaccggtagggttgacgccagggttcgtactgcgtcggaaacctgccacgctttcagcgtgactaacaacagttcgctcttcgccaaaaaatccggatcgtttgccgtcagtgattcgttgaaaaaggaaccatcggtatcgatcagatttacgctgcaataaggttgtggcacccgtagccagccctgtacgtcatgtccatgtttgcacagtgccgaaagccaaagttgtcctaaggctccgcatcccagtacagtaattttcattgttcctcctcacctgcaacagcgccaggtgttatggcgctaattatagcgtcatcagctaagcttctcgttaagcctcgttgcaggtattatgcaacgcaacgaaaatgaagggagaagaaaagatgccatctttcgatattgtttctgaagttgatctgcaggaagcgcgtaacggcgtggataacgcggttcgcgaggttgagtctcgttttgactttcgtggcgtagaggcgactattgaactgaacgatgccaataaaaccatcaaggtgctgagcgagtccgatttccaggtcaatcagttgctcgatattctgcgcgccaagctgcttaaacgcggtattgaaggcgcttcgctggatgtaccggacgagttcgtgcatagcggtaaaacctggtatgtggaagcgaagctgaagcagggcattgaaagcgccgtgcagaagaaaatcgtcaagctgattaaagacagcaaactgaaggtgcaggcgcaaattcagggggaagagattcgcgtgacgggcaaatcacgtgacgatctgcaatcggtaatggcgctggttcgcggcggtgatttgggccagccgttccagttcaaaaacttccgcgattaagttgttatgccggatagagcctcgccgccatccggcaatgcagtatttatcctttgctgataagctgttcaacttcaaagcgattggtcactttgctgtcgattttgacgtaagcggaatgctcttccgccacgatcagcgcttcgcttacgcctttcatttccaacagtcgctgttttagtctgtcgtcagcaacgatatccgctggaatttccacacgcaggctgctgacatagggcggctctttcatggtacttgccaccgccagccataccatcgccagtacggccccggcaaggaaaacggtttgcccatcaaacgtgccgtctatccagccgcccagcgagccgccaagcgccacgccaagaaactgactggtagaatagacgcccatcgccgttcctttataccccgcgggcgattctttgctaataagcgaaggcagcagcgcctccatcagattaaaggcgaggaaaaagagttgtacgccaatcaccagctcccagaaatgttggcccgctccccacaacacgatttctgcgacgacaatgagtcccacgcagaacaggaatacctgcttcatccgccgtttgacttcagcatagataataaaaggcacgacggcggcaaaggcgattaccatggttgccagatacaccttccagtgttcggcggcagggaaaccggcatcggcaagctggccgggcagggcgacaaaggtggacatcaataaaatatgcagacacataatgcctaaattgagtttgagcagcctcggctccgccagcactttactgaagctgcctttgaccatcccggattcgcgattcagcacatggttggtactgttgggaaccacccagatcgtcaaaataatgcccagggtggcgagggcggcgatcatccagaacaacgcgttcaatcccagactatgggtaacgatcggccctaataccatcgcaatcgcgaaggtgataccaaagctgacgccgataaacgccatcgctttggtacggttttgctcgcgggtgaggtcagacaggagcgccatgacggcggcggcaatagcgccggacccttgtagcgctcgccccagaataatgccccagattgagtgggagagcgcggcaatgacgctgcccgcgacaaataccgccagtccgccgacaatcagcggtttgcggccaatgcggtcggacagcagcccaaagggaatttgaaagatagcctgcgccagcccgtaaatgccgatcgcaatgccaattaatgcttcgctggcgccctgtagcgccataccgtatgtggtcagtactggtagaaccataaacatgcccagcatacgcaacgaaaagacggtccctaaaccccatgtggcgcgcagctcccctggcgtcattttataatcgttcattgccacctctgtataaaagctgggagtagtgtagtgcggggagtgtgccgggtaaatagagggttaattagcaaatattatgtttttgaaacagttgagctaaaaaagagataaattgttaacacgataggggcgatcgggagagtcagcatagccttgtgctcattcatattccgatctccttgagctgtagtggctatctgagccatctcagtatagtgtagcggttagccacggccttcaggctgtgtacgctgttgctccatgtagcaatagcagactcgtcaagtcagactgtcagcgaaccgcgctgctggccggtgggtgactttaaacttttgctttgccataggaagccgattctgaaacgatggcaatgatcagaaccgtccatctcctgaaaatttgatttattcaacaacgccgagactgatagcaaactttccgcgtgatggcgcgcgtttatcaggcagaaggttcgtcagcagtcgcatttattatattattcaaggagtgaattcgttatggaaattaaatttttatcattatgtattttagcgggtgttttatttgttagccaggtgaatgcttcagcgaacaacggtaaagatgatgtaaaatatgctgcgcttacccagaaggatcttgatgctttgcctgtggaaaaaagagcttcgtttctggatgaactggggtttatccatgaatacggccttaatgtaccgatgaatcgcgaacaggcgttgcagtattacaagcaggcctgtgagcttggcggtaactacggctgttataatgtgaagtatgcttatcagtatggcgacggagtggccaaagatagcgctcaggccaataagtatgctaagaaaatgaatctggataatttattgattgagcaagaatatattgataagttttcgcaagaaattttcacggcaaaagtattggccgatacggataaatcgcagcgaccagaatttattaatgcactatttaattttctaaataataggccagagagcgatgcgcttttttttagtcgtatcggatttaatcaggaaaaaacgttccgccttgctacgctatgggtgcaggacggcgatccacaaatggattatcaactggggttactcacccttaatgatttctctggtcattatgtggatgagccttataaagccaggccggcctcgttgaaatggtttcgcgccgccgcggaaaaaggcgtcgttgaggcccaatctctcttggggggtatttattcggggggagagggcgatgagtgggggattaagccagacattcaggaagcacaaaaatggtatggacaggcggctaagcagggggacagcgatgcacagattgcgttaggtaaaatctattattctggcgcaacagggcgcactgattacgctaaagcgctggcattatttacgcaggttgaaaatgatggtactaattcgcgctcaacgatgccgttgagttggatgtattataacggtttaggtactgcacctgattgtgataaagcctggtcgtattacaagaaagcatctcgatatgtaggtaagaaagttgaggaaaaaatatttttaagtaaatgcgcagcggatattcagagtcgaaaaaacaacgcggatgctttacctaaagtaactctgaaaaaagagagaattttctctcgcgggataacggctaaaccgaaagaatgcgcactaatttttcagattggcacagataaaattcgtaacatggcgaatttgcatattacgcttgaactgaagaatgctgatggaatggcaactgaggaaacgttgatgattccgccattcggtttgaatactctggggatagatatgcaaaatcatgatgttgatcctctcgttaccccatacgatctcccgctgtatacgcaagatttttgtcacgggattgacgatatccattttacgctgaaatccgctacggcaacgattaacggtaagaatgtcgatttactgaaagctgatagtgtgcgctttttagataaagaataagggaatgaaaaatgataaaacggaaatggagtattttgtttctgcttgggctttctttcgcatcggtatgtcaggcaggtggtgatattgacgcgttgtatagccgtattgcgcagaaagatattcaggcgctaaatgagctaaaagcgttagccaaagataataatgctcaagcgctggcggagttggggtttatttatgagtacggtgtttcagtatctgtggatattccgcaagcaataaagtactacgagcaggcttgtgatttggacggtgattatggttgctttaatgcagcttatttctatgaatatggcatcggtacccaaaaggacattacgcaagcgaaaacattagcaaaacagcttagagaaaaaattaatctatccaatatcaatctcgataaaaaggtgagtgaacgtataattgggagtgtttatagtaataaacttgaggcatatagagacctttcatttcgtcctcattttattcaaggcttaagtttctatttttatgccccgcaatcagatgagcgaaaactgctgagtcgaataggttttgactcatcacatcttgcgcggatagcgatactctgggcgagagagggtgatcctgaggtcgcgtattagacggcaaaactggtctctactttgtattttaataatgaaacgaaaacgatagatattgctgaagcgctgaaatggctccgaatttcggccgagaagggggatgccgactcacagacgctgttaggttttctttatgaacacgctggattgggattacaaccagatggagagaaagccaggaaatggtatgaaatggcggcgcagcaaggtaatggagaagcattgtatacgttaggtcgtatgtactattctggcgtaatggttaacgttgattacgataaagcgctgtatttttttaaaaaagcttatgagaaagaattacaggcggccgctgattatttagcacagatgtattttaatggccagagtgtagatgtcgattgccaacaatcctggcactattacgataacagctatataaaaaagatgacacaacgcgattatcttgattattgtgaaaaagatcgaaagcgccgtaatgattttagtcagcaacttcctgagctgacattagaaaaatatgcgggattatttggcaggattgataatattcctctgtgtcagattggatttgttgtcaatacgaataagttaattcatgttgcgaacttacgtgtggaattgatattaaaaaatgatgctggagttagtgacgaaagaatagtcgcttttcctcctttgggtctcaatactctgggtgctgaacagggtatgggggattcttttaagtcgatgggatatctcttgatgaaaaacggtgacttgtgtgattaccataaacttactttcaccgtgaagtcagcgacggcaacaatcaatggtaaaaaagttgatttactgaaaacggataatttacatattattcagaatcgataactcgtggggcgttactgcctgatgaaatggataaaaaaaccgccgtttgtgacacggcggttttttcaatagcaacgcttgttaccagacgtaagtcagcagattctgcgaattcggcaccataaaatcaacggacatcatgatactcagcgcggtaatcgcaatgatagagaagccgaacagcttacgcgcccagaccttatcatcttccactttgtaaccgcgtagcgccatgccgagccaccaaacgctgaccgccgcggcgaccaccaggtatttgtaaccggcataaccgcccaacgtgagcattagcgttgcaacggcaaacgcaatgatgtacagcgtgatgtggtttttagcgactgagattccttttaccaccggcagaaccgggatattggccgcctgatagtccttaaagcggaaaatggcgatggcgtaagagtgcggcatctgccagaggctgaaaatagccaacagaatcgccgcgccgctgtcaaagtcgcccgttacggcgcagtagccaatcaccggcggcgctgcgccggagagagaaccaatcagcgtgccgtaaacggagtgacgcttcatgtacaagctgtacacgccaacgtagaccacgaagcccatcacccccagccagcaggccagaggattagcgccaaaccacagcagcataaagccagcaatacccagcagggtggcgtataccagcgagacgccaggagaaatcaggcctttgaccagcacccgattcttggtcctttccatcttcctgtcgatatccctgtcgatgtagttgttaaatacacaacccgacgccacaaccagtgacaccccgaccagcgtataaatgaacaggggatagtcaatgctgccctttgaggccagcagaaatcccccgatcaccgagatcaggttgccaaagatgatgcctggtttcgttacttgcaggtattgcttaaacatcatactcgccgctcttagtgcatcatcatgttgtagttgaggttccacataatccagatggagcccacaaccaggatggcgatgatcagcacggtaaagatgaaggccgtcatgttccagccttcatcagatttggtgttcatgtgcaggaaacacaccagatgcaccaaaatctgcaccactgccattgccaggatagatcccagaataacggccggagaggcagcgccggtcatcaccatccagaatggaataaccgtcaggatgaccgacaggataaagccggtcatgtacgtttttacgctgccgtgggatgcgccgccgctctcggtagaatgactcattacatcgcccccatcagataaacaacagtgaatacgcaaatccaaatcacatccaggaagtgccagaacaggctcaggcacatgatgcgggtacggttagtgctggtcagaccgcgacgggcaacttgcaccatcagcaccgccatccagatcaaaccggaagtgacgtgcagaccgtgcgtgccgaccagcgcgaagaacgcagacaggaagccgctgcgatccgggcccataccgttaacaatcaggtgatggaattcatagagttccatcccgataaatccggcaccgaacaagaaggtcaacgccagccaggagataacctggctcttgttgttcttgtgcatggcgatcgccgccatgccgtaggtaatggagctaaataacagcaggaaggtttcaaccagaacgaacggcagttcgaaaatgtccttacctgtcgggccgccagcggtgccgttcaccagaacggcataggtagcaaacagaatagagaacagaatgcagtcgctcatcaggtagacccaaaatccgaagattttgttctggcctgcgtcatggtgcccgtgttcgtgcgcgtgggcagtcgcgtgcgttaaagtatcagttgccatttttcagccctgccttagtaatctcatcgaaatgctggttttccagtttttcgacttccgggaccggcacgtagtaatccacatcttcatcaaagctttttacaatccagctgatgatcatgcctgcgaaacccactatcgccagccaccagatatgccagatcatggcgaagccaaataccgttgcgaaggcggcgataacaataccggcaccgctatttttcggcatatgaatctcttcatattgtccaggctgttggtacgcttcgcctttttctttcatttcccagaaggcgtcacgttcgtgaacgtgcggcacaacggcaaagttatagaacggcggcggagacgaggttgaccactccagcgtacggccaccccatgggtcgccggtcagatcgcggttctgatcgcggtcgcgaatagaaacgaagatctgaatcagttgacacaggatacccagcgcaatcagcgcggcgccggcggcggcaaccatcagcatcgtatggaactgcggatcaatttgctggctgaggcgacgggtcatgcccatgaagcccagtacatacagcggcataaaggctacaaagaaaccgataatccagaaccagaaggcgcgtttaccccaggtttcgttcagcttgaagccaaacgccttcggccaccagtaggtcatacccgcgaagcagccaaacactacgccgccgatgatcacgttatggaagtgcgcaatcaggaacagactgttgtgcaggacgaagtccgcgcccggtaccgccagcagcacgccggtcataccgccgaccgagaaggtcacgataaagccgatggtccacatcattgcggaatggaagacgatacggccctgatacatggtgaacaaccagttgaagatcttcaccccggtcgggatggcgataatcatggtggtgataccgaagaaggcgttaacgttcgcgcctgcgcccatcgtgaagaagtggtgcagccaaacgataaacgacagtacggtaatacagacggtcgcccaaaccagcgaggtatagccgaacagacgtttacgcgagaaggtcgctgcgatttcggagaataccccgaagaccggcagaatcagaatgtacacttccggatggccccaggcccaaatcaggttgatgtacatcatcatgttgccgcccatatcgttggtaaagaaatgggtgcccagatagcgatccagggtcagcaacgcgacggtaaccgtcagaatcgggaaagaggcgatgatcagtacgttggcgcacaaagaggcccaggtaaagaccggcatcttgaacatcgtcatacccggcgcacgcatcttcaggatcgtcacgaagaagttgataccggttaacgtcgtaccaatacccgagagttgcaacgcccatatccagtaatcgaccccgacgctgggactgtactctattcccgatagcggcggataagccagccaccctgtctgcgcgaattcacccacgcccagcgagaggttaaccaggataacgccgacaacggtgaaccagaagctcaggttgttcaggaaagggaacgcaacgtcgcgcgcgccgatctgcagcggaaccaccaggttcatcagaccgataacgaagggcatcgccacgaagaagatcatgattacgccgtgagcggtaaagatctgatcgtagtggtgcggcggtagaaaacccgcttcgcctgcggaggcaagtgcctgctggctacgcatcatgatggcatcggcgaaaccacgtaacagcatcacaatcgcgacgatgatatacatgatgccgaggcgtttatggtcaactgacgttaaccactctttccataggtaggtccacttaccgaagtaagtaatcgctgccagtatcgccagtcccccgacgataattgcagcgatcgttaccatgacgataggttcatggaacggtactgcatccagtgataattttccgaacatcttatcttcctcaacccttggagttggcggattccgcgtggctcatgtccataccttccattccttcatgcgagctgtgctcaccttcaggttgggtcatgtccatgctcttaccgtggtccatgaatttgttaataacgtccttgaacaaatctggtttcacgctggagaaatattccaccttgttgtactcgcttggcatagccactttctcgaacgccgccatatcattcatggtgttcggagactgcttcgcttttgcgacccattggtcgaattctgcgcggtctttggtggcgatagctttaaacttcataccagagaagcccgggccactatagctggcggagatgccatcgtaggttccgggttcgttggcgatcagatgcaaacgtgtttgcataccggccatggcataaatctggctacccagacgcgggataaagaaggagttcatcacggagttggaggtcactttgaaataaaccggcgtgttcgccgggaaggcgatctcgttgacggtggcgataccctgctccggatagatgaagaaccatttccagtccatggaaaccacttcgatggtgatcggtttttcgtcatgcgccagcggcttgcttggttcaagcgcgtgcgtggttttccaggtcagtacggcaaggaaaatgatgattaagataggcaccgtccagaccacggcttccactttattggagtgtgaccagttcgggctatacttcgcatccttattactcgcacgatacttccaggcgaaaccaacagccatcaagatggcgggaataacgacgatcaacatcaggccaaatgccgtcagtatcagcgaacgttgctccagtccaatctgtcctttgggatccagcagcgcagaattacagccactgagtaatgcagtgcctgcaattaatgacaaccatcccaaacttttattgtatttcctgagtctcatttaacgacctcaattccacgggacctggtggcgtttaaagtgtaggggcattttacggtaaggttacattactgtaaacatgattggttctgtgttaccaagttctgccgcgcatgtcacatatgttgccaagtatgtcgaaataactttaagacactgttgaaactttgcgttataacggatgaggtctgtaagtgggatgttgagggataattggtataaccaatgtaaaaataaaacaattacttaacaatttattatcaataaaaggacaatcaacggcagaaatttaaatttaatcggctgaatcgtgtaaagaaaataggtagcgtagaaattaccaataatttccaaaattctgttgcgcacaaaaagacaaatatattttttatcaattgatggttatttagccgttataattccgggtcgttattacaacggcaaataatgttttagagcaggcgtgtttttcgtagtgccaggtagtccagcaacccgccaaagacaatgccgcacacggcaaccgctaccgcagtctcaagcaatccggacaggaatgagaagttagtgtaatccaacgcgttcatggtcagcaggagtacccataccgccagcaaagcgacgcccgcgagcaggattgaaagcgcgaaattgtaggcgccacggtattgcgtgcggggaatgaaacgctcgttctgccagctatattccagcgtttgccgacagaccagcaacagtaacagcccgggaacggcggcaacaaccgagaagaggtagaatgtcggccagccgtgcgcttcaacgaaccagcccgctacaggaccaacataaacgcggcctactgcggagagggccgacagtagggcaaactgtgttgcggaaaacgacttattacatagcgtcattaataaggcgacaaaggcggcagtacccatcccgccgcacagattttcgaaaaagaccgccgcgcccatgctgaacatgtttttatcggtaatggagagcaaccagtaaccggcgttggacgcgccttgcaaaatgccgaaaatcagcagcgcgcgaaacagcgaaagacgctgcattaatatgccgccgtataacgcgccgacgatcgtcgccagcaggcccagcgttttattgaccacgccgacttcgccggcgtcaaagccgacgccgcgaatcaaaaaggtggtggtcaggctcatagcgaaggcatcacccagtttataaagcacaatgagcagtaaaatcagccaggcgttattacggccaaagaaatcgcgtagcggcgcgacgacggcctgttccagcgatttcggggacgggatagtatcggtcggttccggcgccagtaaggtggcgataatgcaggggatcagcaatgccgccatcagccagtacatgccctgccagccgagccagcgatcggccagccatagcgccagtccgccggaaaccagcattcccaaccggtagccaagcacgctgattgccgcgccagcgccgcgttcttctgcgggtaaaacatcggttttccaggcgtcgaacacgatatcctgcgaggcggagcaaaaagcaatcaccaccgccagcgccgccatccagcgtagctgcgtgccgggttcaagaaagcccatcgccgcaatcgccgccagtaacaacagttgggtggcgagtaaccaaccgcgacgacgacctaaaaaaggcggcgtgtagcggtccatcagcggggaccagagaaacttaaacacataggcctgaccaaccagcgagaagaagccaatcgttttaagatcgatattctcgacggtcatccacgcctgtagcgtaccggaagtgagcgccagcgggagaccggaggcaaaacccaatatcagcagaatggctgagcgcggttgctggaaaatacgtaaatattgacttgacataggcatctacagacccggcttctgccgggtcttgttgttgctattaacgggcgttttgcttgataaaatcgtgaatactggtgtcctgagacatatcagcaatggtatcggtcagaacgctattcactgcgtcggcaatattctggttagaggcctggaacgccccttcaatagagtagttggcgcgatagtttttggtcatcttgctgccatttgccgcggtcgcaataatcgcgatatccgctttggtcgcgatgttgtagcgcacgctgccctgggaaacatcagcatacagttggttaacaataatctgcagattaaccgcgccgttaggcccgatcatatagccccgcgccgtcatctgtttttccaggacttcttgtaacaggaagcgtaaatcgcgggaggcggttaacgttaccagctggttgttacgcgtgactttcgctaacgcttgatcctggcgctggtccgcgccggtaatgctaacggtgacgcccatcaggctcgggtcctgctgtggcaaggtgatcttcggcgcgacgtcaatggtcgtcggcggtgtggcgcatcctgccagcataaacagagcgactaacggaaagagaagtttttttaacatattcaggctctcaatgacgcttaaaacgtgataggtaaaaattcccgccatcataacaccgctaacggcgaggggaagtggtcaacgcaggtaaattcgtcgtaatgtccgatttggtattgataacggcgcgagcggggattttgagcgctaaaagaatgattaaggcagtaaacttcatacgtttggctgaaataatcagacgaaagctaaatttttgttgtcatgctgtaatggaaacggtaaaagcggctagtatttaaagggatgggtgacatcacagcgttgtcggaggagattttcatgatgatacgtgagcaaatagaagaaaaattaaggacagcgttcgaccccgtgtttctcgaagttgtggatgaaagctatcgtcacaatgttcctgcaggatcggaaagccattttaaggtcgtgctggtgagcgatcgctttacaggcgaacgttttcttaatcgtcatcggatgatttacggtacgttaacggcggaactttccacaaccgtacatgcgctggcactgcatacttataccctcaaagagtgggaaggattgcaggatactatcttcgcgtcgcctccttgtcgcggcgcgggaagcatcgcgtagcaaaacggatttgcaactacctccgcttttccagtatgttgctacagaattatgtgaaaacggcctgcgggccgttttgttttgtctgaattttgagcgtgtcgtacagtattcagacaaaaattagccgagaattgtgaaaaccgccgcagcatcgcacaatcaccgttctcgactcacaaaagtgatgccgctataatgcgccgtcttatatatgaacgtcttcgggatgattctgacgacagggaatgtgattgattatgagaacatcccggttccgcgaagcaaatagcacgtgcttgcggagtagagttgaccgagcactgtgattttttgaggtaacaagatgcaagtttcagttgaaaccactcagggccttggccgccgtgtaacgattacaatcgctgctgacagcatcgagaccgctgtaaaaagcgagctggtcaacgtagcgaaaaaagtacgtattgacggcttccgtaaaggcaaagtaccgatgaatatcgtcgctcagcgttatggcgcttctgttcgccaggacgtgctgggcgatctgatgagccgcaacttcgttgacgcgatcatcaaagaaaaaattaacccggcaggcgcgccgaactatgttccgggcgaatacaaagtgggtgaagacttcacttactccgtcgagtttgaagtctatccggaagttgaactgaccggcctcgagtccatcgaagttgaaaaaccggttgttgaagtcaccgacgctgacgttgatgtgatgctggacaccctgcgtaagcagcaggcgacctggaaagaaaaagacggcgctgctgatgcggaagaccgtgtgaccatcgacttcaccggctctgtagacggcgaagagttcgaaggcggcaaagcgaccgatttcgttctggcgatgggccagggtcgtatgattccgggctttgaagacggcgttaaaggccacaaagctggcgaagagttcactatcgatgtgaccttcccggaagagtaccatgctgaaaacctgaaaggtaaagcggctaagttcgttatcaacctgaagaaagttgaagaacgcgaactgccggaactgaccgaagaattcatcaaacgtttcggcgttgaagatggttccgtagccggtctgcgcgctgaagtacgtaaaaacatggaacgcgagctgaaaggcgcggtgcgtaaccgcgttaagtctcaggcgattgaaggtctggtaaaagctaacgacatcgacgtaccggctgcgctgatcgacagcgaaatcgacgttctgcgtcgtcaggctgcgcagcgttttggtggtaacgagaaacaggctctggagctgccgcgcgaactgttcgaagaacaggctaagcgtcgtgtagttgtcggtctgctgctcggcgaagtcattcgtaccaacgagctgaaagcggacgaagaacgcgttaaaggcctgatcgaagagatggcgtctgcttacgaagatccgaaagaagtaattgagttctacagcaaaaataaagagctgatggacaatatgcgtaacgtcgctctggaagaacaggctgttgaagcggttctggcaaaagcgaaagtgtctgaaaaagccacttccttcaatgagctgatgaaccagcaggcgtaatttgtcgcgttaaaagcacgaaatttgcacaaaaacccgtcacctttcagtgacgggtttttttttgtcacgcattttgcatggtaagggtgcgaaaaccgcgtttcagtgttagcgttagagcaaaagattgttatgcttgaattatggcgatgccgtacccattacagagggactggctgataatccgtccatcaggttacaatcagtacagcaggttttttcaatttttatccaggagacggaaatgtcatacagcggagaacgagataatttggcccctcatatggcgctggtgccgatggtcattgaacagacctcacgcggtgagcgctcttttgatatctattctcgtctacttaaggaacgcgtcatatttctgaccggccaggtcgaagaccatatggctaacctgatcgtggcgcagatgctgttcctggaagcggaaaacccggaaaaagatatctatctgtacattaattctcctggcggcgtaattactgcggggatgtccatctatgacaccatgcagtttattaagccagacgtcagcaccatttgtatgggacaggcggcctctatgggggcgtttctgctgactgccggggcgaaaggcaaacgtttctgcttgccgaactctcgcgtcatgatccaccagccgctgggcggctaccagggccaggcgacggatattgaaattcacgcccgcgaaattttgaaagtaaaagggcgcatgaatgaacttatggcgcatcatacgggtcaatctcttgagcagattgaacgtgatactgagcgcgatcgcttcctctccgcgcctgaagcggtagagtacggtttggttgactcaattttgacccatcgtaattgatgccctggacgcaagtgtgccgctatacacttcatccttcacgctacctcggtgttggctgttagcgcgcctcccagtgacttacttatgtaagcgcctgcggagtcgccgagttgccgccttgatgtagctcgaatgattttgtgtatatactaatgaagggcggcacaacgctgattagcggcttgcgcctgagaatggcatttgcgtcgtcgtgtgcggcacaaagaacaaagaagaggttttgactcatgacagataaacgcaaagatggctcgggcaaattgttgtactgctctttttgcggcaaaagccagcatgaagtgcgcaagctgattgccggtccatccgtgtatatctgcgacgaatgcgtcgatttatgtaacgacattattcgcgaagaaattaaagaagttgctccgcaccgtgaacgtagtgcgctgccgacgccgcatgaaattcgtacccacctggacgattacgttatcggccaggagcaggcgaaaaaagtgctggcgctggcggtctataaccactacaagcgtctgcgtaacggcgataccagcaatggcgtcgagttaggtaaaagcaacattctgctgattggaccgaccggttccggtaaaacgctgctggcggaaacgctggcgcgcttgctggatgtgccgttcactatggcggatgcgaccacgctaaccgaagcgggttacgttggtgaagacgtcgagaatatcattcagaaactgttgcagaaatgcgactacgacgtgcaaaaagcgcagcgtgggattgtctacattgatgaaatcgataagatttcgcgtaaatcagacaatccgtccattacccgcgatgtttccggcgaaggcgtacagcaggcgttgctgaaactgatcgaaggcaccgtcgccgcggttccaccgcagggcggtcgcaaacatccgcagcaggagttcttacaggtagatacctctaagattctgtttatctgcggcggcgcgtttgccggtctggataaagtgatcgctaaccgtgttgaaaccggctccggcattggttttggcgcgacggtgaaagcgaagtccgacaaagccagcgaaggcgagctgttgtcgcaggttgaaccggaagatttgatcaaatttggtctgattcctgagtttatcggtcgtctgccagtggtagcgacgctgaatgaactcagcgaagaagcgctgattcaaatcctgaaagagccgaaaaatgcgctgaccaagcagtatcaggcgctgtttaacctggaaggcgtcgatctggaattccgtgacgaagcgctggacgctatcgccaggaaagcaatggcgcgtaaaaccggcgcccgtggcctgcgttctatcgtcgaagcggcgctgctggataccatgtacgatttgccatctatggaagacgtcgaaaaagtggtgatcgacgagtccgttattgccggtcagagtaagccgttgctgatttacggcaaaccggaagcgcaggcttctggcgaataattaaacattcatacaatcagttagccaaaaaaggggggattttatctcccctttcgtttttcctgtaaacacgccgttgaatgtgtgggaaacatccccatatactgacgtacatgttataggtggtatggagcacagctatactatctgattacctggcggacactaaactaagagagagctctatgaatcctgagcgttctgaacgcattgaaatccccgtattgcccttgcgcgatgtggtggtttatccgcacatggtcatacccttatttgtagggcgggaaaaatctatccgttgtctggaagcggctatggaccatgataaaaaaatcatgctggtcgcccagaaggaagcatcgacggatgagccgggtgtaaacgatcttttcaccgtcgggaccgtggcctctattttgcagatgctgaaactgcctgacggcaccgtaaaagtgctggtcgaggggttacagcgcgcgcgtatttccgcgctgtctgacaacggcgaacatttctccgcgaaggcggagtaccttgattcgccagccattgatgagcgtgaacaagaagtgctggtgcgtaccgctatcagccagttcgaaggctacatcaagctgaacaaaaaaattccgccggaagtgctgacgtcactcaatagcattgacgaccctgcacgtctggctgacaccatcgccgcgcatatgccgctgaaactggcggataaacagtccgtactggagatgtccgacgttaacgaacgtctggaatatctgatggcgatgatggaatctgaaatcgatctgctgcaggttgagaaacgcattcgcaaccgcgtgaaaaagcagatggagaaatcccagcgcgagtactatctgaacgagcaaatgaaagcgattcagaaagagcttggcgagatggacgacgcgccggacgaaaacgaagcgctgaagcgtaagatcgacgcggcgaaaatgccgaaagaggcgaaagagaaagcggaagcggaactgcagaagctgaaaatgatgtctccgatgtcggcggaagcgaccgtggtgcgcggctacatcgactggatggtgcaggtgccgtggaatgcgcgtagcaaggtcaaaaaagacctgcgtcaggcgcaggaaatcctcgatactgaccattatggtctggagcgcgtgaaagaccgcatccttgagtatctcgcggttcaaagccgtgtaaataaaatcaaggggccgatcctgtgtctggtggggccgccgggggtaggtaaaacctcgttgggccagtccatcgctaaagcaacagggcgtaaatacatccgtatggcgctgggcggcgtgcgtgatgaagcggaaatccgcggtcatcgccggacttacattggctctatgccgggtaaactgatccaaaaaatggccaaagtgggggttaaaaacccactgttcctgctcgatgagatcgacaaaatgtcttctgacatgcgcggcgatccggcttccgcactgctggaagtgctggatccggagcagaacgtggcgttcagcgatcattacctggaagtggattacgatctcagcgatgtgatgttcgtcgccacttccaactccatgaacattccggcgccgctgctggatcgtatggaagtgatccgtctgtccggttataccgaagacgagaagctgaatattgctaaacgtcacctgctgccgaagcagatcgagcgtaacgcgctgaagaaaggcgaactgacggtcgacgatagcgcgattatcggtattatccgctattacacgcgtgaagcgggcgttcgtagtctggagcgtgaaatctccaaactgtgccgcaaagcggttaaacaactgttgctcgataagtcgttaaaacatatcgaaattaacggtgataatctgcacgactacctcggtgtgcagcgctttgactatggccgcgcggatagcgaaaaccgcgtaggtcaggtgacgggcctggcgtggacggaagtgggcggcgatctgttgaccatcgaaaccgcctgcgtcccgggcaaaggcaagttgacctacaccggctcgctcggtgaagtgatgcaggaatccattcaggcggcgctgaccgtggtgcgtgcgcgcgcggaaaaactgggtattaatccggacttttacgaaaaacgcgatatccacgttcacgtgccggaaggcgcaacgccgaaagacggtccaagcgccggtatcgcgatgtgtaccgcgctggtttcctgcctgaccggtaatccggtgcgcgcagatgtggcaatgaccggtgagatcacgctgcgtggtcaggtgttgccgatcggcggcctgaaagaaaaactgttggcggcgcatcgcggcgggattaaaacggtcttaattccgttcgaaaataaacgtgacctggaggaaattccggacaacgtgattgccgatctggatattcatcctgtgaagcgcattgaggaagttctgacgcttgctctgcaaaacgaaccgtctggaatgcaggttgtaaccgcaaaatagtgacctcgcgcaaatagcgctaataaaaacagggctggcaggctatttcggacttgccagcctttttttgtatagctaatttagatggttgattgggtctgccaccattaacgggtgttgtaagggcgtggcaggcctgatataactgctgcgcggtcgtacttcgaaggattcaggtgcgatataaattataaagaggaagagaagagtgaataaatctcaactgatcgaaaaaattgctgcaggggctgatatctctaaggctgcggctggacgtgcgttagatgcgattattgcttctgttaccgaatctctgaaagaaggggatgacgttgcactggtaggctttggtacttttgctgttaaagagcgtgctgcccgtactggtcgcaacccgcaaacaggtaaagagatcaccatcgccgctgccaaagtgccgagtttccgtgcaggtaaagcgctgaaagacgcggtaaactaagcgtgatcccctcgggggatgtggcaaagtacaagggcgcatcaactgatgtgccttttttattggcgattcgggactttctgtgcgttgcgggctgacaattgccctcgtttcttgtcacaataggcttttgtgcgccgcgttcagaaaatgcgatgcgcgtgaagtctctatacgcaaatcattcaggttgcgtcgacgcggctactgagcgaatcactcagtagccagcagagaagccgcctgaaagataaagtgtaaagtcacctacagcggagtgtggttacaccatgatggacagcttacgcacggctgcaaacagtctcgtgctcaagattattttcgttatcattatcgtgtcgttcattttgaccggcgttagtggttacctgattggcggaagcaataactacgccgcaaaagtgaatggccaggaaatcagccgggcacagtttgagaatgcgtttaacaacgaacgtaaccgtatgcagcagcagttgggcgacaggtattctgaactggcggccaacgaaggttatatgaaaagcctgcgccagcaggtgctgaatcgtctgatagatgaagcgctgttggatcaatattcccgcgaactgaaactgggcatcagcgatgagcaggtaaaacaggcgattttcgccactcccgcttttcaggtggacggtaagtttgacaacaaccgctataacgcgattgtgaatcagatgggaatgaccgccgatcagtacgctcaggcgctgcgtaaccagcttaccactcagcaactgatcaacggcgtggccggtactgattttatgctgaaaggggaaaccgacgaactggcggcattagtctctcaacagcgcgtggtgcgtgaagccgttattgatgtcaacgcgctggcggcgaagcagcaggtgaccgatcaggaagtgtccagctactacgatcagaataaagtccgctttatgacgccggaacagttccgcgtaagctatatcaagctggatgccgcgacgatgcaggcaccggtcagcgatgcggatattcaggcctattatgaccagcatgtagatcagtttactcagccggagcgtattcgttacagcattattcagaccaaaacggaagatgatgcgaaagcggtactggatgcgctgaacaagggcgaagatttcgccacgctggcgaaagagaaatctaccgatatcatctctgcgcgtaatggcggcgatatgggctggctggaagagtctgccacggtgccggaactgaaaaacgccggattaaaagaaaaaggccagatatctggcgtgattaagtcgtctgtcggttttctggtggcgcgtctggatgatattcagcctgccaaagtgaaaccgttaagcgaggttcgcgacgacattgccgcgaaagtgaaacaggaaaaagcgctggatgcttactatgcgttgcagcagaaagtgagcgatgcggcaagcaacgacaatgagtcgttagcaggcgctgaacaggtcgctggcgtaaaagccgttgaaaccggctggtttagccgtgacaccttaccggaagagctgaacttcaaaccggtagccgatgctatctttaatggcggtctggtaggcgaaaacggtacgccggggccgaattcagacattatcaccgtagatggcgaccgggcttttgttgtgcgcgtgagcgaacataaacctgaagccgtgaagccgttggcagaagtgaaagaacaggtcactgccctggtgaagcataataaagcggaacaacaggcgaagctggatgcggaaaaactgctggtcgagctgaaagcgggcaaaggcgcggaagcgatgaaagcggcggggctgagttttggcgagcctaaaacgttaagtcgtaccagtcaggatccggtgagtcaggcggcctttgcgttaagccttccgacgaaagataagccagtttatggcgtggcgaacgatatgcagggtaacgtcgttctgctggcgtttgacgaggtgaaagcgggcgccatgccggaagcgcagaaaaaagcgatggtgcagggcatcacgcagaacaatgcgcaaattgtctttgaggcgctgatgagcaatctgcgtaaagaggcgaaaatcaaaatcggcgacgctctggaacagcagtaatcgtcgaggcgcttcgcaaaaaattgcaaaacgttgtatcccacaaaggccgctttcgcggccttttccatttctgagaattgccgtttgttcgtttttctccgccccgctatcgtggctgcactgttaacaaacaaggagaaaacagtatgaaacacggaattaaagcactgcttattacactttctttaacctgcgcgggcatggcccatagcgcactggcggcgacgcctgtcgcaaaaaatgcagcggtggaaacaaaagcggatacgccttcttcatcctccgccaaagcggcattacctgctaaagccagcgatgatgaaggtaccagggtgagcattaataccgcgtctgcggaggatctggcgcgggtgatgaacggcgttgggctgaaaaaagcgcaggctattgtgagctatcgggaggagtatggtccttttaaaacggtggatgatttaaagcaggtgccgggaatgggaagcgcgctggtggagcgtaatctggcagttttaacattgtaatcacttgcatagtggccaaaatttgccagactgtagaggtcataccagttatgacctctgtacttgtcgtttacttataacaacaacgtaaggttattgcgctatgcaaacacaaatcaaagttcgtggatatcatcttgatgtttatcaacatgttaataatgcccgctatctggagtttctggaagaggcccgttgggatggtctggaaaacagcgacagctttcagtggatgacggcccgcaatattgcctttgtggtggtaaacatcaatataaattaccgtcgcccggcggtattgagcgatctattgaccgtgaccagccaggtacaacagcttaacggtaaaagcggcgtattaagccagacgattacgctggagccagaagggcaggtggtggccgatgcgctcatcacgtttgtttgtattgatttaaaaacgcaaaaagcgctgccgctggaaggcgaattgcgtgaaaagctggaacagatggtgcaataacgcttcgcagtctgatggcgttgaacttgtccggcctggcgatattgaccatggtgaatatcgccaggccggataaggtgcatgcgccgccatccggcaaaacaatcaccttaacccggttttttgcttcattgccgccatcaccgccgctttattcgacagataatgattcaggccgttagcgcgcagattacaggccgcgcaatgaccacagccatcgcctttaatgccgttatagcaggtcagcgtctcttcgcgaaccaaatccagttggccccaataatcggccagcgcccaggtttcagctttatcaatccacattaagggcgtttcgaaacggatatctttcgccatgcccagattcaccgcgtgattcagcgctttgacgaactcatcgcgacagtctggatagccggaaaaatcggtctcgcaaacgccagtgatcaccgcttcggctttaacctgataagcgtaaatcgccgccagcgtcagaaagagaatattgcgtcccggtacgaaagtattggggataccgtcagcgttcggttcatagtccggcaccggaatgctatcccgcgtcaggctgctgaccgccagttcgttcagcaaagtgacatccaacactttatgcgcgcgtgcgccaagttttaacgccagcgcccgcgcgacatcaatctctgcgcggtggcgctgaccataatcaaacgtgacacaatgcacttcatcatactgatgccgcgcttgcgccagacaagtggtggagtcctgacctccactaaatacaacaacggcgcgtttcatagttatcctgatcaatgacgaaagccaatatggtaacgcgtacggataatcccgaccagcttcttcacggcgaaggcggcggaagccaggcttcgctaaattcaaaccagccgcgaggggtgagtcgaacgccgttaacgcccggtggggcgctgatgcgatagtgataattaaatagtggcgtaagtgtggcgtcatccatcaggttagcaaaaacttgttgtagcgcggcgcggcgatctttttcattgggctgaatttgcagagcgtcaagcgtagcctgcagatgggaaaacgcaggcgcgtccaggacatgtgaccagatctgatcgcaacgtagccactgctccagcgtatattccggcgcttcgccgatcagcctgtcgcccatcatcagatccgcttgcgccaacgcagggcagttatcccagtttttggcattatgaaaaatcaacgttaactcacagccgagcgtcgccaggtaatgtcgaagctgttccgccatcgtatgcagctctacgggaaggtgatacgccagggtaagttttttcggcaatggcgtttcatcaacgtcctgccattgcgggattgtccagccgggtagcagcccctgacttggcataatcaagttctcatctaccggtaaggttttcagcagcgaagtatgatggataatatgtatcagacgccgcgcctgctgtacgttgagccgtgagccctttttgagggttaaataacaaaagccaagactgataccactacttacctgactcagcgtcgccagctcttccggtttgccgatggcaatctgcaccggatggcggcaactggtgcccagatcctgggcaaacagttgcggggtgatccagaattcaatcgctttcagcagcggatggctgaggtgataatggtcatgactttccagacgcaccagttccggcgtgaacaacgccaggcgaaaaggaccggtgccgataagcggcaggtcaggatgcgccagaccgctacaatagctcgccagacgatgcgccagccagtaatcaggtcggtgaaggagaaaggtcaggcactgaggatgcgttacttcgatccgtgcgacgctaataaacaatttgcttagcgcgggtagggtaagcagcctttccaggcgttcgtgtagctgcgcggtatccaccgcatcgccattatgccagtgcagcgtggagcgaatataaaaatcccagcgtaaaccgtcggcggaaacctcccagtgatgcgccaaatccccgcaaggatattgactgtcgcggtcgaagcgcgttaacccggaaaaaacttgccctgcgagatgctgttccgcgcggcctggcaggaaacccggctgcagcggatcaagcggacgatagtagggaatacgcaatgtcggcgtatcgttttgccattggccgcccataaaaggctggagcatcgcccgtaactcgcccggcgccagctgcgccagttccagtacgttgagctgctgccctttttccagcgcctgttccatcatggcggtgcggagcgattccggcgtgaccagaaactggagccgtccacgtttcccgcgcccggactgcgcctcccatcttagccaacctgcctgctgggcctgacgcagcagcgttcgcagatggcgctcgctacaaaaacagcgttcggccagttcgctaacggtgacatgttgcgtttccccggcggaaggctgccagaggcgttgatattgattaagccgattcagtagcctcatagaaacccggaacacttccttttatctgttcactattacttccgtatatctcaggtaatactgaacaacaagttaaccgcgtcacagtgtggagaaagagatggcccgtctggcagcatttgatatggatggcacgttattaatgcccgatcaccatttgggtagagaaacgatcgccacgctggcgcgtctgcgcgaacgcgatatcaccctgacattcgctacgggtcgtcatgtgctggaaatgcggcatattctggggacgctttcactggatgcttatcttattaccggtaacgggacgcgaattcactcgctggaaggcgacgtgctgcatcgtcaggatctcgatcctcaggttgccgatacggtgatgcaccatgcctgggatacccgagccagtatgcatgtgtttaatgacaacggctggtttacaggccaggagatccccgcgctactccaggcgcacgtctacagcggctttcgttatcaggttatcgatataaaaagtattccggcccatcaggtgacgaagatctgtttttgcggcgatcatgacgatctgatccgtttgcgcattcagctcaatgaggcgctggaagaacgcgcgcacctctgtttctctgccgtcgactgcctggaagtgctaccgctggggtgcaataaaggatcggcgctggcggtattgagcaaccatttagggctttcactggcagattgcatggcgtttggcgacgcgatgaacgatcgggaaatgctgggcagcgtcgggcgggggctcattatgggcaatgccatgccgcagcttatcgccgcgctgccacacctttcggttatcggacattgtggtaatcaagcggtatcacactttttgacgcattggctggacaatccgcatctaccttattcccccgaatgagagatctcttccagcaagccagacattcagtctggcttttttttggtttctagtcgccggtaagtaattttgcgatggccgctgaccacggcgtcaaatcgccgatatggtcgctaacccaggccggatggtaataggtatccagatagcgatcgccgctatcgcacaataacgtcacgatagcgccggtttctccagcctcgcgcatccgggccgcaagctgcagcgctccccacatattcgtgccggtagaggcgccgactttacggcctagctgcgtttccagccagtgtgcggtggcaacgctggcggcgtccggcacgcgcagcatctcatccacgacatccggaataaaagaaggctctactcgcggacgaccaattccttcaattttactgcctaccgggctgcgtaatgaagcgtcgcgatcctgccagtaaggtaaaaagacggaattttccggatccaccaccatgagctgagtatcatagccctggcagcgaatatagcgcccaatcgtcgcagaggttccgcccgttccggcgctcatgacgataaatcgcggtaccggatggggttcgttgcgcatctggcggaaaatactgtcggcaatattattgttgccccgccagtcggtagctcgttctgcgtaggtaaactggtccatatagtgaccgttcagttcatgcgccagccgctcggaggcggcataaatttcgcaggcgctctccacaaaatgacagtggccgccgtaaaattgaatctgttcgattttacgttttgcggtacaggcgggcatgacggcgatgaacggcagtcccagtaaacgcgcgaaccaggcttcggaaatcgccgttgagcctgatgatgcttcaataatcggagtgccttctttaatccagccattgcacaacccataaaggaacagcgagcgcgccagacgatgcttgaggctaccggtgggatgcgtgctttcgtctttcaggtaaagctggatacctggaaatgccgacaggggcaaacgaataagatgcgtatccgccgagcgctggtggtcagcgttaatttcattaatggcatttttaacccaattgctactcatcattaatatccatttatcattttgtgccaagagtagcgaaaagtacggaaaaaattgttgctatttgacctttaaattacaatgtaaggagaaaaatattctctatggagtgggtatgttagataaaattgaccgtaaactgctttgcttattgcagcaggactgtaccctctctttgcaggcgctggcggatgccgttaatctgacgacaacgccttgctggaagcggcttaaacgcctggaagatgacggtatcctgcttggcagggtcgcgctgctggacccggaaaaactggggctgggattaaccgcttttgtgttgataaaaacgcagcaccacagcagtgaatggtactgtcggttcgtgaccgtcgtctctgagatgccggaagtgcttggcttctggcggatggcgggggaatacgactatctgatgcgagttcaggtggccgacatgaagcggtatgacgacttctataaacgtctggtcaatagcgtcccaggactgtcagacgtcacctccagttttgcgatggaacagattaagtacaccacctctctgcccattgaataattctcccggtattgccggaaatcatatcaggaaataacgcgtgcgattatttgctcaattaagctggtactttcgccgggaatggcgtcgctatcttggcgcggtggccctgcttatgcttattgcgatgcttcagctgatcccgcccaaagtggtggggattgtcgtggatggcgtaaccgcacagcattttactccaggccgaatagcgatgtggattggcaccattgccctgatcgccgtagtggtctatttgttgcgctatgtctggcgcgtgctgctgtttggcgcttcttatcaattagccgttgaactgcgtgaagattattatcgccagttgagtcgtcagcatcctgaattttatcagcgccatcggacgggcgatcttatcgcgcgtgcgacgaatgatgtggatcgcgtcgtatttgcggcgggcgagggcgttctgacgctggttgactcgctggtaatgggctgcgcggtactgattgtcatgtcgacgcaaattagctggcagctaacgctattagcgctgttgccgatgccgattatggcgctgatgatcaaacgttacggcgatcggctgcatgactatttcaaactggcgcaggccgccttctccagcctgaacgaccgcacgcaggagagtctgaccagcatccgtatgatcaaagcgtttggtctggaggaccgccagtcttcgctgtttgcggcggatgccgaagataccggcaagaaaaatatgcgcgtggcgcgtattgacgcgcgttttgatccaaccatttacatcgccattggcatggcgaacctgctcgcgattagcggcggaagctggatggtggttaacggcagcctgacgctgggcgaactcaccagctttatgatgtatctggggttgatgatttggccgatgctggcgctggcctggatgtttaatatcgtggagcgggggagcgccgcttacagccgcatccgcgccatgctggcggaagcgccggtagttaaggatggcgaagagccggtcccggcggggcgcggcgaactgacggcggccattcgtgagttttgctatccgcaaacgacgcatccggcgctggagaatgtgaactttcgtcttaaaccgggtcagatgctggggatatgcggtccgaccggcgcggggaaaagcacaatattgtcgcttatccagcgccattttgatgtgacgcagggagagatccgtttccatgacgtgccgttgacgcatctgcagctggatagctggcgtagccgactggcggtcgtcagccagacgccgtttttgttctcggactctattgccaataatattgcgctcggacgcccggaggcgactcaggaggagattgaacaggtggcgcgtttagccagcgtacatgaggatattctccgtttgcctcagggctacgacacgcaggtaggtgaacgtggcgtcatgttatcgggagggcaaaaacagcgtatctcgattgccagagcgctactgttaaatgcggaaattctgcttctcgatgatgcgctttctgcagtagatggccgcacggagcatcagattttgcataatttgcgccagtggggcgaagggcgtacggtcatcatcagcgcgcatcgtttatccgcgctgaccgacgccaatgaaattatcgttatgcaacatggtcatgttgttcagcgcggcgatcacgatcaactggcgcagcagattggctggtatcgcgatatgtatcgctatcagcaactggaggccgctctggatgacgcgccggaacgcggcgaggaggcggtgaatgcgtagttttggacagctatggccgacgctgaaacggttgctggcgtatggctcgccatggcgaaaaccgctctctgtcgcggtgatgatgctgtggattgcggcggcggcggaggttagcggtccgctgctgatcagctatttcattgataacatggtggcccgccaccatttaccgttgggcaaggtcgcggggctggcggccgcctatgtggggctacagtttctggcggcgggtctccattacgcccagtctttattatttaaccgggcggccgttggcgtggttcagtccttgcgcacggacgtcatggatgccgccttgcgtcagccgctaagcgccttcgacacgcagcctgtcggacaattaatttcacgcgtgaccaacgatacggaagtcatccgcgatctgtacgtcacggtcgtcgcaacggtattacgtagcgcggcgttgatcggcgccatgctggtcgctatgttcagccttgactggcggatggcgctggtggcggttttgatttttccggcggtattgaccgtgatggtcatttatcagcgctacagcacgccgattgtacgccgcgtgcgggcatacctggcggatattaacgacggctttaacgaaatcatcaatgggatgagcgtaatccagcagtttcgccagcaggcgcgcttcggcgaacgcatgggcgaggccagccgctcgcactacatggcgcggatgcagacgctgcgcttggacggctttttattgcgtccgctgcttagcctcttttccgcgctcattttatgcggtttgttgatgcttttcagctttacgtctgccggcacgattgaggtcggggtgctgtatgcgttcattagctatttgtcacgtctgaacgagccgctcattgaactgaccacccagcaatccatgctacagcaggcggttgtggcgggagagcgtgtttttgaactgatggatcgcccgcgccagcgctatggcagcgacgacaggccgttacaaagcggggcgattgatattgatcatctgtcgtttgcttaccgcgacgataatcttgttttacaggacattacgctatcagtaccgtcccgtagctttgtggcgctggtggggcacaccggcagcgggaagagcacgctcgccagcttattaatggggtattaccccctgacacaaggcgaaattcggctggatgggcgagaaatcgcctctcttaatcatcgcgttttacgccagggcgtggcgatggttcaacaggacccggtagtgatggcggatacctttctggctaatgtgacgctggggcgcgatgtctccgaggcgcaggtgtggcaggcgctggaaacggtacaactggcagatctggcgcgcggcctgagcgacgggctgcatacgcatctcggcgagcagggaaatacgctgtccgtcgggcaaaaacagctattggcgctggcgcgcgtgctggttgacgccccgcaaatattaattcttgatgaagcgacggccagcatcgattccggcactgagcaggcgatacagcaggcgctggcggcgattcgcgagcgcaccacgttggtggttattgcccatcggctatcgacaatcgtggaggcggataccattctggttctccatcgcggccaggcggtggagcgcgggacgcatcaacaattgctggcggcgcaagggcgctactggcaaatgtatcaattacagttagttggcgaggagttagccgccagcgtacacgaagaacccggccctgcggcataaggtttggcaccacagggcaaagcctcgcccattatgcaccgtcgtggtgcgtttttctttccctgcttcgattttggggcgcgtcaatataaagacgcgccgctaactgcgcttttcctcgctcgccagcttctggcacatcctttgcaatatccattctgaagagtccatgcgcggcggcagccgttacctaattctgactggagggttctatgaagctggttaccgtgattatcaaaccgttcaagctggaggacgtgcgggaggcgctttcttccattggcattcagggactgaccgtcaccgaagtgaaagggtttggccgtcagaaaggacacgccgaactgtatcgcggcgcggagtacagcgtgaatttcctgccgaaggtcaaaattgatgtggctatcgccgacgaccaactggaagaggtgatcgatatcatcagtaaagcggcttacaccggaaaaattggcgacggcaaaattttcgtcgcggagctcatgcgcgttattcggattcgtaccggcgaagctgacgaagcagcgctgtaagacccgccacacagcaacaggaaatgaaaaaatgaagatagcgatgataaaaaccacactggcttcactggcgctgctgcctgggctaacgatagccgcgccggcggttgccgataaagcggatagtgcttttatgatgatttgcaccgcgctggtgctgttcatgacgataccgggtatcgcgctgttttacggcggattaattcgcgccaagaacgtgttgtcaatgttaacgcaagtgaccgtcacctttgcgctggtctgtattttatgggtggtgtacggctattcgctggcttttggcgaagggaatcatttcttcggtaataccgatggggcgatgttgaagaatatcgcgttgacggcggtaacggggacgatttatcagtatattcatgtcgcgtttcagggatctttcgcctgtattaccgtcgggctgattgtcggcgcgctggcggagcgtattcgtttttcggcggtgctgatttttgtcgtggtgtggttcacgctctcttatatcccgattgcgcacatggtgtggggcggcggcctgctggctgctcacggcgcgctggattttgccggtggtacggtggtgcatattaacgccgctatcgccgggctggtgggggcttatttaattggcaaacgcgtcggctttgggaaagaagcatttaaaccccataacctgccgatggtctttaccggtactgcgattctgtatatcggctggtttgggtttaacgcgggttctgcgggtagcgcaaacgagatagcagcgctggcctttgtgaacaccgtggtggcgaccgccgccgcgattctggggtggattatcggcgagtggactctacgcggtaagccttccctgctgggggcgtgttccggcgcgattgccggtctggtcggcgtgacgccagcctgtggctatgttggcgttggcggcgcgctggttatcggcgttattgcgggtctggcgggattgtggggagtcaccatgcttaaacgtctgttacgggtagatgatccgtgcgacgtatttggcgttcacggcgtttgcggaatagtcggctgtatcctgaccggcgtttttgccgccagttcgctgggcggcgtcggctttgtcgacggcgttacgatgggacatcaggtgatggtacagctggaaagtattgctattacggtcgtctggtccggcgttgtcgcgtttgttggttacaaactggcggatatccttgttggactgcgtgtaccggaagagcaggagcgcgaggggctggatgtgaacagtcacggcgagaatgcgtataacgcgtgattgcgcaacatgcctgatggcgctgcgcttacccagtctaccgtaggccggataagcgcagcgtcatcaggccattaacgccgcatagcggcacgttttttaattgtgattgcgcattaccccttcctgcacggttgaagcgaccagcgcgccatcctgagtataaaactcgccgcgaacaaagccccgggcgctggaggcggaagtgctctccacgctataaagtagccattcattaaaattgaacggacgatggaaccacatagagtgatcgatcgtggcgatctgaatgcccttttccagaaaaccgatgccgtgaggctgaagcgcgacgggaaggaaattcagatccgaggcgtatcccagtaaatattgatggacgcgaatgtcatccggaacggtgccgttggcgcgaatccatacctgacgcacaggcgcggcgacgtgacctttcaacggattgtgaaattcgacgggacgaatttccagcgggcgatcgcagagaaacttttctttcagaatcggcggcagtaaatgcgccagcgattgcgcgatttccgtttctgacggtagtccttccggcccgactgctgtcggcatggttttttgatgttcaaaacccggttccggcgcctggaatgaggcggtcatgtaaaagatgggtttcccgttctgaattgcggcaacgcggcgggcgctgaagctattcccatcgcgcagcacttctacgtcatagataatgggtttttggctatcgcctggccgcagaaaataactgtggaatgaatgcaccagtcgcgcttccggcaccgtttctttggcggcatagagcgcctggcccaccacctgaccgccaaatacctggcgcagccctaagtcttcactttggccccgaaagagtccttcttcaattttttccagattcaataatgtcagcaaattattcagtgtctgactcatacatactctccaggtgacaacgatgccgaagcgaggtagggcagagtataacgcaattttgcaagtggtccgatgggtacaaaagtctgaataacagaccaattccaggcaaaaatgagtgacatgtgccacacttaatcacgttatgtttctgttaaccactcttccggcggggggaaaggcctgctggtgcattgatgataaggagaattgaatgaaactcgtgcacatcgtaagtggtttagcggttgcgatatctctggcggcctgcgctgataaaagcgctgatatccagacgcctgcgccaaaccctaacatgtcgattacagctaaccagtctactattcagcaacccaatgtttccggtaccgtctggatccgccagaaggtcgctctgccgccagatgcggtgctgaccgtgacgctttcagatgcttcgctggctgatgcgccgtctaaggtgctgtcgcaaaaagcggtacgtaccgaaggtaaacaggcgcctttcagttttgtgttgccgtttaacccatcagatattcaacctaacgcgcgtattctcctgagcgcggccatcaccgttgacaataagctggtatttattaccgatagcgtgaaaccggtgattaacaatggcggcactaaagcggatctgacgctggtaccggtacagcaaacggcggtgcctgtgcaggccagcggtggtgcgacgacgacggttccatcgacttcgccgacccaggtcaatccgtcttctgccgttcctgcgcctacccagtattaatcctgcgccaaccctctccgttacggagagggttaatacacccagcgatagcgttgtaaatcgatttgtccgcttcccgacaccactacgccttccgccagtaatgcctgacgttgccgctgtagatccggcccggtaagtgatattgcgccctggcggttcaccacccgatgccatggtaaagtgctgccttccggcagacgttttaaaactccgccgacctgacgcgctgcccgaggggaaccggcaagccgggcgacatcgccgtaggtcgtgacaaacccttccgggatcgaagcgacgatttgccagacgcgttgaggaaatgtgtcctgaatatccataatagaatcctgcgttaatgcttcaggataatctggaataaggggggaggaaagcccggatgcgcaagaaaccagcatccgatgcctgatgggttgcaattgcacgatatagcagtgataatgcgcctgcgcgttggttcacaacgctctcaatgggggctctgttggttctcccgcaacgctactctgtttaccaggtcaggtccggaaggaagcagccaaggcagatgacgcgtgtgccgggatgtagctggcagggcccccacccatttgtgcctctccacactgttcttttctgctgtgcgacgttatagccgctgttccgcccaaagaataaatgccgtagcgggtaggggcttactgtataaccagccctgaccataatgtacgccatgctggcgtagccactgttcttgcctggtcgtttcgatgccttctgcgaccatcttaagtttgagcgttttcgccatttcaataatatgcggcgtgacgtttttatattccagcgcatcgacaaaagatttatcaattttaaggacatccacatccagattttgtaagtagctgaggctggaatagccggtgccaaagtcatcaatataaattgaatgtcccgcgttacggtatctggcgacaattggcgcgctggttttcggatcggcgaactcgcgttccgttaactcaagcgcgatttgcgacggagaaatttggctacggttcagcagcgtgcttaacagcgtcggcaacgtttccgacgccagatcggatgcctcaagattgattgaaatatgttgttcggggtgggactttaaccaactccccatgtcttcaaaaacggtgtcgatgattagccgggttagcggctccgtgagcccggtttgttcagccagcgcgataaaaatttccggcgaaaggaaagtgccgtccgcctgttgccagcgagctaaggcttcggcaccgacaatttttccgctgctcagggagacaataggctgatagtgtacgttaatttcgcgattgtctatcgcatcctggagacggtggcggggcgactgtagccgacgcaaaatacgcagaataaaggccgcggccagcagacccgttacgatgcccgccggtagccagataaacgcctgtcgataccagctcctttccagcggagcggtcggtgcccagcttacgatagtaatgcccatttccggaaaggggtggatagcatactgaatgcctcggttttccagccgcaggggcgtctcatggtgaatgagcggaagaatagcggggtcaaggttaccgctgctggcaaccacagtattgcgttcccggccaataatagcgacgtcaatcggccatgcgccaaacggaatcacatcgataaaggacgccgggtcgatcatcacgatatagctgtcgctcccgagtgccgccatataacgttttatacccagatcgttttgcgccgtaaaccaggcgcgataaccgtcgcgagtgattttcatgggcggagggaaagcgggaatatggctctctttttcaagtgaggagcaaacgggaatcgaatttttaagatacagaacttcctggacataccgaaagctataagacacgcggcgcatggcgagtaaatgggcgctgctgcagggctcgcctttaaaggaggcaatatgcgttaacgcggcttttgcctggtcactgaccctttctgtacgtagcgccacccgggacgagaagatatccagctcttcgttaaaccttttttcaacttgacggtgcgccagccacaggctcaatcctatcgggaaaaggacagacaggataagcactcccgttaccaggctgaccagatgtcgtgttgtcacagtgatgtccttataaacacagcgtagagaaagtatatccgatcgtaaatcgcgcccttgaatgataaagctattttatcgattttacagatacaggggccagactaacgcgttacgccacgttgcttttgccgccaggaagagatcgtgaatgtttaccggttgaaaaaggagcattgatagcgtattttattgttatgttataacataattgagagagcgcaatgaaacctgatattcatcctgtataccgcaccgtcgtatttcacgacaccagcgcaaatgaatatgtgaaagtgggatcaactatcaaaactgaacgtgaaatcgaactggacggcgtgacatatccgtatgtcactattgatgtgtcatcaaaatcgcatcctttttataccggtagacagaaaacgtttgatagcgaaagtagcgccgcacgcttccagaaacgttttggtcattttatcggcgctaaacgggggtaaatgaaatgcaggtgttaaactcacttcgcaatgcaaaacaacggcatccggattgccagatagtcaaacgcaaaggacgcttatacgtgatttgtaaaacaaatccgcgttttaaggcggttcaggggcgtaaaaaaagacgttaaaaaaccaacggttcagggaaagcagtgcgtaccagggagggtgcgcacttttttattaccggctggcttctgcgcgggccagcgtaaaaatatcgtagaaggaaagttcgcccttacgggcaaccattttttgcagctggactttatgttcattatccacctgtggagactgaagaatcgtctcaatgagcgtggggggaacaaagcgggtgttgtaccattcgccgttgtaacagacccggaggtccagcacatcgatgtcgttatagtgataacgcggggcgatgtcgaaaaagaagaagccattaaatgcgataaataacaccactaacagccacactgaccccaccagcgtttctgattgcagcatgaccgccagcgtcgcaaaccaggctgcatacatcgcgataaataacccaggatgcttgcggataaaactgatactaaaacgcggcctgttatcgcgtttttcacggacgtttaagtcatcaatagtttcgctaagcaggcgctgtatctctgtcatcttttgccttcatgatttctgcgacatagggggtagtaacagcccattttaaagggaggtgtaacgtgaaaaaagtaacagattaaccacgaattagcataacagttatcatttgaactacaattttttaatgattcgcgccggatttccgcctaccacgacgtctggcggtacgttttttgtcaccacagcgcctgaagcgacgacgacgttatcgccgatggttacgccaggattaacgacggctcgtccgcctatccagacgttatttccgatagtgacgggtttacctaattctctgccgctgttgcgttcgacggcgtccagcgggtgcgtggcggtatagatatgtacccctggcgcgagcatacaattatcgccaatatgaatagggcaaacatcaagcatgacgcagtcgaagttagcgtaaaaggagtgaccaagaaaaatattatagccgtagtcgcaacggaaggaaggttcaatataggcgtcttcgcatcgacccaacaggtcgcgtaaaatcgcctgacgcttatttatttcatcaggcgtagtataattgtattgatggatgagttgacgcgcccgcagtcgatcctggcataaagtttcatcggtcgggcaatacagtgccccagcgatcattttttgtttttcgtcactcatcgcgcgctccccttggtggatattatcgcaatagaagcaataataaagtattagagggaacgttccctgctattgctatgtgatctatatcactgttctataatagcccgttgtgttattagccagaacgaggaggcagataacacctgcgtgttctctaaaaagtaatgtagcgtgattaacgaatgaatttccatactgaagaggggatcttgtcgtagagtttgttcatcgtcaattctgcaagacggtgatccgcagctgagtaaaatacagccagctcattgtcggacaattcatatttatttttctcaatgacgcgctccagagtgtcaattgtctgacagcgccgtaaacgcatcaaataatcagttttagttaatggtttatcagacataaattctacctatgattgtaataatttttaacaagacaaactaacaggattggccctggtggcgttgacgaaacaacggaacaggcggttgcccgatttacgccatttttgcaaatcctgcgtattaataccatagctgctgaacaacataaaggtgtcgtccaggtattcatctatctgcgcaatcaatttattgtcttcattgtacttaattttataattaagcgcgaaagttgcaatatgctctatcagctcattgagctgcaggttgactgctgaggtcgggtcattaacccagccatggttgctttcttcaaggtttgcaagacagtcatgatacagggtttcgcaaagaaatttaagctgtgctatatcatgtcttttgggtgagtattcgtccataatgcatcccctttttagtggcttaaactaaccgaacaccttcgggatggatacaactaactaacctggtacttcccacgtcaccttatgatttaactataatctactctaaaaaacttttcatcgtcatattacgaaaaattacaattgcgtgaaagccgcgtgttgccatactttttcgaattttaacagtgatcgtcggtcgcctaaaaaggaaccagttttattgtttgtgtaatcattgggttaacgttttttagcttttcaggctaaaacaatagactctgacaggagaaaatagccaggaatattcttaatatttcttaattaatggctgaattaagaaatggccaactttcctaagaaaagcctttaacgcagtaaggattataccttttattaatatggcaaaaaataatcaatctaacaataagcgtattttatgatttttgcgtaaaaaaggccgcttgcgcggccttatcaacagtgagcaaatcagcgatgttctgtcgaatgactatgctcaatatcttcgcttttacggctaaagcggcggcgtaccaccacgaagaagaccggtacgaagaaaatagccagtacggttgccgttaccatcccgcccagtacgccagtacctaccgcattctgcgcgccggaacccgcgccggaactgataaccagcggcataacccccagcatgaacgctaacgaggtcatcagaatcgggcgcaaacgcatccgaacggcctccagcgtcgcttctaccagacctttcccttctttatccattaagtctttggcgaattcgacgataagtatcgcgttcttcgccgacaacccaatggttgtgagcaggcccacctggaagtaaacgtcgttagtcagtccgcggaaggtcgcagccagcagcgcgccgataaccccaagcggaacaaccagcattacggagaacgggatagaccagctctcatacaatgccgccagacacaggaagacgacgatcagcgagatagcatacagggcaggggcctggttgccggacaaccgctcctggtaggacatcccggtccagtcatatccaatgcctgacggcagcttgctggccagttcctccatcatcgccatcgcttcaccagtactcttgcctggcgccgcctgacccagaatttccatcgaaggcagaccgttatagcgttccagacgcggcgaaccatattcccagcgggaagaggagaatgcggagaacggcaccatctgaccatcgctaccacgaacgtaccagtcgttaatatcatccggcaacatgcggtatttcgcttcggacatcacgtaaactttcttcacacgaccgcgatcgataaagtcgtttacatagctgccgccccatgctgcgcccagtgtggtattaatgtcgctaatagacacgcccagcgcctgagctttttcctggtcgatatcgattttaaactgcggcgtatcttccagaccgttaggtcgaacgccgaccagcagatcaggatatttcgccacctcgccgaacaactgattacgtgcctgggtgagtttttcatgaccaagtcccgcctggtcaatcaactcgaagtcaaacccggttgcggtgcccagttcaacaatcgccggtaggttaaaggcgaagaccatcgcatctttaatttgtgaaaacgctgcggttgcccgctgggtaatcgcttcaaccttgtttttttcgcctggacgatcggcccagtctttcaacgacacgaatgcaataccggtattctgaccgcgccctgcaaaaccgaagccgttgacggcgaataccgattcaacgttggctttctctttgttcagatagtaatccgtgacctcatccagcactttttgcgtgcgctcttgcgtcgcgccggcggggagctggaccattgtcaggaatacgccctggtcttcatccggcaagaaagagcttggcagacgaacgaacagataagccataccgacgacgataatgagatagagcagcagataacgcccggtgctgcgcagaatattgcctacgctatcggtgtagtgatgcgtgctcttatcaaacaggcggttaaaccagccgaaaaagccttttttcccttcgccatgatcgcctttggcgacgggtttgagcatcgtcgcgcacagcgcaggcgtcaggatcagcgcgaccagcaccgacagcgccatcgccgatacgatggtgatagagaactgacgataaattgccccggttgagccgccaaagaaggccatcggaataaataccgccgacagtaccatcgcgatacccaccaatgcgccctgaatctggcccatggatttgcgcgtcgcttccttcggcggaaggccttcttccgtcataacacgttcgacgttctcgaccaccacgatggcgtcatccaccagcaagccgatggcgagcaccatcccgaacatcgtcagcgtgtttatcgagaaaccgaatgccgcaagcacggcaaaggttcccaacaacaccaccggaaccgcaatagtcggaatcaacgtcgcgcggaagttctgcaggaacaggtacatcaccaggaacacgaggataatcgcttcgaccagcgtttttaccacttcatgaatagagatcttcacgaacggcgtggtgtcatacgggtagacgattttcatccctggcgggaagaacggttccatttttttcagttcggcgcgaatagcggtagcggtatccagcgcgttggcgccggtagccagtttgatgccaagacctgacgctggctgaccgttaaatttcgcgatgacgtcgtagttctcgccgccaagctcaattttcgctacatcccgcagacgaacctgggagccatcctgattcactttcagcaggattttgccaaactcatccgttgaggtcagacgcgtttgggcaataatcgatgcgttaagctgctggccttttaccggcggcgtaccaccgagctgacctgccgcgacctgggcgttctgcgctttgatcgcgttaatcacgtcgaccggcgtcagttggtatttggtcagctctgtcggattcatccagatacgcatcgcatactgcgaaccaaacagctgaacgtcgcccaccccagaggtacggctgatcggatctttcatattggcggcaacgtaatccgaaatatcctcctgggtcatggtgccgtcggtgttaatgacgcccactaccatcaggaagctacttgaggacttctcaacgctcacgccctgttgctgtacttcctggggaagtaaaggcattgccagttgcaacttgttctgaacctgaacctgcgcgatatccgcatcggtgccggattcaaaggtcagcgtgatctgcacggtccccgtggagtcactgttggaggacatatacatcaggttatcgataccgttcatattctgttcgataacctgcgtgacggtatcctgtaccgttttcgcatcagcgccagggtaggttgcggagatcgtcactgctggtggcgcaatcgtcggatattgcgctaccggcaatttgaggatcgcgagcccccctgccaacatgatgatgatggcgatcacccacgcaaatatagggcgatcgataaagaaattaggcatgtcttaacggctcctgtttaagttaagacctgggctgagcaggttgatcaccgcttgcggcttgctgtttgttatccgcggtaatttcctgcactttaacctgtgcgccaggacgtactttttgcagcccgctgacgactacgcggtcgcccgctttcaacccgtcagtcaccagccacttatcgccgatcgcctggcttgcgacgatttggcgggtttccactttgttatcagcgccaaccaccagcaccgtggcatcgccgcgtggagtacgggtaacgccctgttgtggaaccagtaatgccgtcggttttgtcccttcctgcagacgtgcgcgaacgaacattcctggcaataaggtgtgatccgggttagggaagatggcgcgcaaagtaatagacccggtggtttggtcaacggtcacgtcggagaactcaagcgtaccggactgcgggaatttgataccgtcgctggtcaccagatcgaccttcgctttgccgttttcctgtttcagcgaaccatttgccagctcctgcttcaggcgcaggaagtcattgctggactgggtcacatcgacataaatagggtccagctgctgcactgtcgccagcgccgacgcctgaccgttctgtaccagcgcgccttccgttacggacgacttaccaatacgaccgctaatcggcgaggtgactttggtatacgccaggttgatacgtgcggtttcaacggcggcttttgctgcgacaacggcggcagtcgcttgttgcgcgtcagccagcgcctgatcgtattcctgcttactgatgtactgcgtacccagcagcttttgataacgcttcaccgtcagttcagcgatattcgcggcggcctgcgcttttgccagatcgcccttagcgctgtcgtaagtcgcctggtaggtcgcaggatcaatctgatagagagagactcccgcttcgatatcacttccctcaacgaaattacgcttcaggataatgccgcttacctgtgggcgaacttcggcgatacggtaagcaacggtacgacccggaagttcagttgtgatttgcagtggttccgtttttagtgtgacaactccaacttctggcatctgctggccgccttgctggtcctgtttgtcgtcacatcctgttagcgctaagctgcctgagagcatcagaacgaccgccagaggcgttaaccctctgtttttgttcatatgtaaacctcgagtgtccgatttcaaattggtcaatggtcaaaggtccttaaacccattgctgcgtttatattatcgtcgtgctatggtacatacatccataaatgtatgtaaatctaacgcctgtaaattcaccgacatatggcacgaaaaaccaaacaacaagcgctggagacacgacaacacatcctggatgtggccctgcgtttgttctcgcagcaaggcgtatcagcaacctcgctggcggagattgcgaacgctgctggcgtgacgcgcggcgcaatctattggcatttcaaaaataagtcggatttattcagtgagatctgggagctatcagaatccaatattggtgagcttgagattgagtatcaggcaaaattccccgacgatccactatctgtattaagagaaattttagttcatattcttgaagctactgtaacagaagaacgacgccgcttattgatggagattatattccataaatgtgagtttgtcggagaaatggttgtggttcaacaggcgcaacgtagcctttgtctggaaagttacgatcggattgaacaaacgttaaaacattgtattaatgctaaaatgctgcctgaaaatctgctgactcgtcgtgcggcgatactgatgcgcagctttatttcagggctcatggaaaactggttatttgctccgcaatcgtttgatttaaaaaaagaagctcgcgcctacgtcacgatcctgctggagatgtatcaattgtgtccgacgctgcgcgcgtcgacgttcaacggctccccctgataatattccaggaaaactcctggacattttctgtgtcgctattctgtttgttacaggcgtgatattcttgcgactcaattatttccggtctgcttgccggttcagacacttcattctcatgactatgttgcagctttataaacgttcacagcattttgtttttattacaattagcgtccttattatcctgctgtcctgtcagtctctggcatttgcccgggggcaaacgaatggcgacctgccgtcaaaagcggatgtgcaaaaccagctggatacgctgaataagcaaaaagatctctccgcccaggataagctcgtccagcaggaccttattgatacgttagctacgctggagaaaatcgagcgggtaaaagaggagaccgtacagctacggcagaaggtggcgcaggcgcctgaaaaaatgcgtcaggcgacggctgcgttgaatgcgctgagcgacgtcgataatgatgatgaaatgcgaaaaacgctgagtgcgctttcgttacgtcagcttgagctgcgcgtggcgcaggtactggatgatttgcaaaattcgcaaaacgatcttgccgcttataacagccagcttgtttcgctacagacccagcctgagcgcgtgcaaaacgccatgtataccgcctcacagcaaatacagcaaatccgtaaccgtctggacggcaataacgtcggcgaagccgcgcttcgccccagccaacaggtgttattacaggcacaacaggcgctgcttaatgcgcagatcgaccagcaacgtaagagtcttgaaggaaataccgttttgcaggacaccctgcaaaaacagcgggattacgtgacggccaacagtaatcgccttgaacatcagcttcaacttttacaggaggcggtcaacagtaaacgacttacgctaacggaaaaaacggcccaggaggccatttcgccggacgaaacggcgcgtatccaggcgaacccgctggtaaaacaggaactggatattaaccatcaactcagccagcgtctgattgtcgcgaccgaaaacggcaatatgttgatgcagcaaaacattaaagtaaaaaactggctcgatcgcgcgctgcagtcggaaagaaatatcaaagaacagattgccgtcttaaaaggcagcctgttgctgtcgcgtattctttatcaacagcagcaaaccctgccctccgccgacgaactcgaagatatgaccaaccgcattgcggatttgcgtctggagcagtttgaaatcaaccagcagcgtgatgccttattccaaagcgatgcctttgtcgacaagctggaggaggggcataccagcgaggtgaatgatgaagttcatgatgcgttgcttcaggtggtggagatgcgccgtgagctattggatcagctaaataaacagttgggtaaccagctgatgatggcgattaacctgcaagttaaccagcagcagttgatgagcgtctcgaaaaatctgaaagccattctgacgcagcagattttttgggtgaacagtaaccgccctatggactgggactggcttaaagcgttcccccaaacgttaaaagagcaattcagcgccatgaaaatcacggtgaactggcaaaaagcctggcccgcggtatttattgcttttttggccgggttgccgctcttgctcatcgccggtttaatccgctggcgtctgaaatggttaaaagcgtatcaacagaagctggccgccgccgtgggagcgttgcgtaacgatagtcagctcaatacgccaaaagctattctgatcgatctgatccgcgcgctgccggtgtgcctgattatcctcgcgcttggactgatcctgctgaccatgcagctaaatatcagcgatctgctctgggcctttagtaaaaagctcgcaatgttctggctggtctttgggctgtgctggaaggtgctggaaaaagagggcgtggcaatacgccatttcggtatgccagcgcagttgaccagccactggcgtcgccagattgtacgcattagcctcgcattgctgccgctgcacttttggtctgtggtggcggagttgtcgccgctgaatctgatggatgacgtgctggggcaggcggttattttcctcaatctgctggtcataacattgctggtgtggccactgtgccgggaaagctggcgcgataaagaatctcacggcattcgactggtgaccgtgacgattctttccattattccggtggcgttaatggtattaacggcgaccggctatttctataccaccctgcgcctggcggggcgctggattgaaaccgtctatctggtcattatctggaacctgctttatcaaacggtgctgcgcgggttaagcgtagcggcgcgccggattgcctggcgacgcgcgctggctcgtcgtcagaacctggtaaaagagggagcggaaggcgcggagccacaggaagaacccgccatcgcgttggagcagattaaccagcaaacattacgtatcacgatgctgctaatgcttgccctgttcggcgttatgttctgggcgatttggtccgatttgatcaccgtattcagctatcttgatagcatcacgctgtggcactacaacggctccgaagctggcgctgcggtggtgaaaagcgtgacgatgggcagcttgctattcgccattattgccgcgatggtggcctgggcgctcatccgcaacttacccggcctgttggaagtgctggtgctttcacgtctgaatatgcgccagggggcttcgtatgcgatcaccacgatccttaactacgtcattatcgctgttggcgcgatgacagtattcggatcgctcggcgtctcgtgggataaactccagtggctggcggcggcgttgtcggtgggtctcggttttgggctacaggagatcttcggtaactttgtctcgggtttaatcatcctcttcgaacgtccggtacgcattggcgatacggtaacgatcggcacctattccggcacggtcagtaagattcgtattcgcgccaccactattaccgattttgatcgtaaagaagtgatcattccgaacaaagcattcgtaacggagcggctgattaactggtccctctccgataccacgacacgtctggtgatccggcttggcgtggcttatggctcggatctggagaaagtgaaaagagtcctgctacaggcggcgatggagcatccgaaggtgatgcacgatccggaacctgccgtattcttcaccacctttggcgccagcactctggatcatgaactgcgtctgtatgtgcgtgaattgcgcgatcgtagccatacggtggatgaactgaaccgcgcgatcgatcgactgtgccgtgaaaatgatatcaatatcgcctttaaccagcttgaggtgcatctgcataacgcgaagggcgacgaagtcactgaagtgaagcgcgatctcaacggcggcgatctggcgcctacggcaagctaaaaggcggtgggccgcgcgctttatgagtgcgcgcggcgccgctaatgcgacagcgtagaaagctcttccggcgtaatgccggtgacgctggcgatgagcccgggttccagcccgttggcaagcattttgcgggcaatagcgcgcgcttcggcctctcggccttgtgctaacccttgctcaaggcctttttgcaggcccttttgcaacccttccgttcggcctttttcttccagccattccgctattgtcatcagttgttccttatactgcggcgcgccctgcgccagttgacgaattagcgccccgggttctgcggcgtttcctgctttcaacatatagttgatcaacacactgagctgcgtgtccgtcaaatgatcctgcgttaaaagcgtgataagggggtcgagcagttcgcttaaatcgcgttgacgaatatgtttttgcaggagctctaacatcgctatccgccgatgctgcaaaagctgattatccggcattgtcgtcaggtcgaccagcgcaaattcgcagctgtataaggccttcgccatatccggtttcacaaacatattatgccagttaaggctatagggccacgggctttccggaccgtgataaaagaggattggtaccaccagcggcaaggtatcatgaccggcatccagatgacgctgcatggcggcaatggcgtaccgcatcaggcgaaaagccatcagccggtctgatttgctctgatgttcaatgagcgcgtaaacataccctgggccgtgttgggtatgcagagagtagagaatatctgaatagcggctgcgtaaattgtcttcaacaaaactccctgactccagcttcagtgaatccagatcgcagattgcaagaaaggcttctggcaagtggatagccagaaagtcgcgggcgacctctttttgcatcagcatttgtcgaaataccgcatcgtgcggcgtggtgggtagacgttccatgacctgtcccttgttgcctgactgtagcgaccactctgtcagcgacaacgaggacaaaccagagggcaattactctgtttgcgagtcgtcttccgtactttttaacttgttttcataatctcgcataactatttccagcgcgcgtagcaccgttcgtgccggtaagcgattctcttcaagcagcacaattaaatccacggccagtttgacttcatcaggggcattttcaagcgacatactttctccagggttagcgggttaaacgcgccagtacgttttctattttctccagcgcatgtcggcaacgcgccagccgtccttcatagatctcgacttccttttgcagcgtttgttgttcgacaaggccggtcgcctgcgccagacgaattttgcgctcctgtgtcatcgccagtagtcgacgttcaaactcctgatgctgtattcgtctgcgctgccaacggccaagccctggcgcggcggcgtcccactggcgcagcgaccaggcggcggtttcatgcgatatcgcctccagttgcgaagccagatgttctgccagccaggcgacttgcggcagttgctcatgttttaccgcctgacgcaacgcggcgagattggcgtcagcctcttccagatatccctgcaacagagtactgcgggtacggaaaagatgtcggtcaaagcgcgcgcttaacgtcgcatgttgcgccagcggcgcgcagcgttggcgtagcgtcgccagcctctcttccagcgtctgtaacagcatagcggttttcaattcaacaccccgatgaaaataagacaggctgtgctacagtagccttctgtttgataacgattcgcattatgcaacgtactattttaatcatcattggctggctggcggtagtattagggacattgggcgtggttttgcctctgttgccgacaacgccgttcattttactggcggcctggtgtttcgcccgctcgtcgcctcgtttccatgcttggttgttataccgctcatggtttggcggttatctgcgccactggcagcgctatcgggccatgccgccgggagcgaaaccgcgagcgatcgcgttgatattgctgacctttggtatttcgctgtggctggtgaatatgatgtgggtgcgggtgctgctgttggttattttggcctgtctgctgatctttatgtggcggataccggtgattgatgaaaagcaacaaaagcgctgaagcacacgaatcgctgttgcaattgtcgttcacagccagtaaattcgaccgttttcgagcacaggcgcaggcggtcaaagagtaaccgagcgttacccctgaccgaaaagtattgcgccgtgagtaacaccgtacttagcaggcatatatccatgaccgcgactgcacagcagcttgagtttctcaaaaacagcatcaaaagcattcaggattacccgaaaccgggcattcttttccgtgatgtcaccagcttactggaagacccgaaagcctacgcgctcagtattgaactgttggttgagcgttataaaaatgcgggtatcaccaaagtggtcggcaccgaagcgcgtggcttcctgtttggcgcgccggttgcgcttgggctgggcgttggttttgttccggtacgtaaaccgcgcaaattaccgcgtgaaactattgccgagacctatgaattagagtacggcaccgatcagctggaaattcatgtcgacgcgattaaacctggcgacaacgtgctggtcgtggacgatctgctggcgactggcggcaccattgaggcgaccgtgaagctgatccgtcgtctgggcgggaaagtcaccgatgcggcgttcatcatcaatttgttcgatctgggcggcgagcagcgtctggaaaagcaggggattacctgttatagcctggtgccgtttccggggcattgattcaggctattcgcactgctattttagccagagagacaacctcgctgtatcggcgaggttgtgttagcattacccttctatgaatccaccttccagcgtttcagagcctgccaatgagttatcaggtcttagccagaaaatggcgcccacaaacctttgctgacgtcgtcggccaggaacatgtgctgaccgcactggcgaacggcttgtcgttagggcgcattcatcacgcatatcttttttccggcacgcgcggcgtcggtaaaacctctatcgcccgactgctggcgaaggggctgaactgcgaaaccggcattaccgcgacgccgtgcggcgtttgcgataactgtcgggaaattgagcaagggcgttttgtcgatctcattgagattgacgccgcatcgcgtaccaaagtcgaagacacccgcgacctgctggataatgtccagtacgcgcctgcgcgcggtcgctttaaagtctatctgatcgatgaagtccacatgctgtcgcgccacagctttaatgcgctacttaaaacgcttgaagagccgccagcgcatgtgaaatttttactggcgaccaccgatccgcagaagctgccggtgaccattttgtcgcgctgcctacagtttcatctcaaagcgctggatgttgaacagattcgccatcagcttgagcatattctcaatgaggaacatatcgctcacgaaccccgcgcgttgcagttgttatcgcgtgcggctgacggcagcctgcgcgatgcattaagtctgactgaccaggcgatcgccagcggcgacgggcaggtttcgacgcaggcggtaagcgccatgctcggtacgctggacgacgaccaggctttgtcattagtcgaggcggtggttgacgctaacggcgaacgcgtcatgtcgcttatcaacgaggcggcggcgcgcggtattgaatgggaagcgctgctggtcgaaatgcttagcctgctgcaccgtattgcgatggtgcaactttcgcctgccgcgttaggcagcgatatggcggctatcgagcaacggatgcgcgaacttgcccggacggtgcctcccggcgatcttcagctctattatcagacgttgttgattggtcgcaaagaattgccctgggcgccggaccggcggatgggcgttgaaatgacgttactgcgtgcactggcgtttcacccgcgtatgcccttgccggagcctgaaacgccgcggcagtcttttgcgcccgtggccccaacggcggtaatgacgccgccgcaggtgcagcagtcgtcggcgcccgcgccgcagacatcgccagcgccgctgccggcgtctaccagtcaggtgctggcggcgcgcaatcagctacagcgcgcgcagggagtaaccaaaacaaaaaagagtgaaccggcagccgcatcccgcgcgcggccggtgaataactctgcgctggagcggctggcctcggtttcggagcgcgtacaggcgcgcccggcgccgtctgcgctggaaacggcgccagtaaagaaagaggcttatcgctggaaggccaccacgccggtagtacaaaccaaagaagtggtggctacgccaaaagcgcttaagaaagctctggagcatgaaaaaacgccggagctggcggctaaactggcggcggaagcgattgagcgcgatccgtgggcggcgcaggtaagtcagctttctttgcctaagctggtggagcaggtggcgcttaatgcctggaaggaacagaacggcaacgcggtttgtctgcatctgcgctcgacgcagcggcacctcaattccagcggcgcgcagcaaaagctggcgcaagcgctcagcgatctgacgggaacgacggttgaactgaccatcgttgaagatgataatcccgcggtgcgtacgccgctggaatggcgtcaggccatttatgaagagaaactcgcgcaagcgcgtgagtcaattattgcggataataacattcagacgctgcgtcgattcttcgacgccgagctggatgaagagagtatccgccccatttgatcgtaagcctggcttgcgattgtgaaccatcaagagagagagcttatgtttggaaaaggcggtctgggcaatctgatgaagcaggcccagcagatgcaggaaaaaatgcagaaaatgcaggaagagattgcgcagctggaagtgaccggcgaatccggcgcgggtctggtgaaggttaccatcaacggcgcgcataactgccgccgcgtggaaattgacccaagcctgctggaagatgacaaagagatgctggaagatctggtcgctgcggccttcaacgatgcggcgcgccgcattgaagagactcaaaaagagaagatggcttccgtctcttccggtatgcaattgccgccaggctttaagatgccattctgatgcaaaccagtccgctgttaactcagcttatggaagcgttgcgctgccttccgggcgtcggccctaagtcggcgcagcggatggcgtttaccctgttgcagcgcgatcgcagcggcggaatgcgcctggcgcaggcgctgacccgggcgatgtcggaaatcggccactgcgccgactgccgcacctttaccgagcaggatgtctgtaatatctgttcgaacccgcggcgtcaggaaaacggccagatttgcgtggtggagagtcctgcggatatctacgccattgagcagaccgggcaattttccgggcggtatttcgtgctgatgggccacctgtcgccgctggacggcatcgggccggatgatatcggtctcgatcgtctggaacagcggctggcgtcagaaaaaatcagcgagctgatcctcgcgaccaacccgacggttgaaggagaggctaccgcaaactatattgccgagctgtgcgcggaggccggcgtcgaagccagtcgtatcgcccacggcgtgccggttggcggcgaactggagatggtcgacggtacgacgctgtcccactcgctggcgggacgccataagattattttctgaacaaacggaggcggcattcgcggcctccgcttgaaatcacacccgcttgtccccatctcaccctcaacgtatttttaccattaaaaatggcattgttgaggtctatccacatgaaaggacaagaaacgcgtggttttcagtcagaagttaaacagcttctgcacctgatgatccattctctttattccaataaagaaatcttcctgcgtgaactcatctctaacgcctcagatgcggcggacaagctgcgtttccgcgctctgtcaaacccggacctgtatgaaggagatggcgagctgcgtgtgcgcgtctctttcgataaagataagcgtacgttgaccattgccgataacggcgtggggatgaatcgtgatgaggtgattgaccacttaggcaccattgccaagtccggcaccaaatctttcctcgaatcaatggggtccgatcaggcgaaagatagccagctcatcggtcagtttggcgtaggcttctactccgcgtttattgtggccgataaagtgaccgtacgtacccgtgcagcaggcgacaagccggaaaatggcgtgttctgggaatcggcaggcgaaggcgaatacaccgttgccgatatcaccaaaaatgaccgtggtacggaaatcaccttacacctgcgtgaaggcgaagatgaattcctcgatgactggcgcgtacgctcaattatcagtaaatattccgatcacatcgcattgccggtagagattgaaaaacgggaagaaaaagacggcgaaaccgtgatttcctgggagaaaatcaacaaggcccaggcgttgtggacccgtaacaagtcggaaattaaagacgacgagtacaacgagttttacaagcacatcgcgcatgatttcaccgatccgctgacctggagccacaaccgcgtggaaggtaagcaggagtacaccagcctgctgtatatcccgtcgcaggcgccgtgggatctgtggaaccgcgatcacaaacatggtttgaagctgtacgtacagcgcgtgttcattatggacgatgccgagcagttcatgccgaactatctgcgtttcgtgcgcggcctgattgattctaatgacctgccgttgaacgtctcccgtgaaatcctgcaggacagcacggtaacgcgtaatctgcgcagcgccctaaccaaacgcgttctgcaaatgctggaaaaactggcgaaagacgacgcggaaaaataccaaaccttctggaaacagtttggtctggtgctgaaagaaggcccggcggaagatcacgccaaccaggaagcgatcgctaaactgttgcgctttgcctccacccataccgactcttccgcccagaccgtgtcgctggaagattacgtctcccggatgaaagaagggcaggaaaaaatctactacatcaccgcagacagctatgcggcggcgaaaaacagcccgcacctggaactgctgcgtaagaaaggcatcgaagtgctgctgctctccgatcgcatcgacgagtggatgatgaactacctgaccgagtttgacggtaaagcattccagtcggtcgctaaagccgatgagtccatcgaaaaactggcggatgaagtcgacgaaaacgcgaaagaagcggaaaaggcgcttgagccgttcgtggagcgtgtcaaaaccctgctgggcgatcgcgtgaaagaggtgcgtctgacgcatcgtttaaccgacacgccggcgattgtcaccaccgatgcggatgaaatgagcacccagatggcgaaactgttcgccgcggccggtcagtccgtgccggaagtgaaatacatctttgagctcaacccggatcatgtgctggttaaacgcactgccgataccgaggatgaagcgcagtttaaagagtgggtcgagctgctgctggatcaggcgctgttcgctgaacgcggtacgctggaagatccgaaccagtttatccgccgtatgaaccagttgctggtgtcctgataacgctcatctgattgccggatagcgacgcgaagcatcttatccggcctacggacgggtactgttttgtgactgccggatggcgacgtgaaacgtcttatccggcctacggacgagtactgttttgtgactgccggatggcgacgcgaagcatcttatccggcctacgggcgagtactgtttgtaggccggataagcgccagcgccatccggcattttttataataccttctcttttctcgatttctcttcgttaaccgtttcagcatcaggcggcttccttgagcgaaatgcgtgatggtggtatcgtttagcgctttttaaaaaatatcgacaacctttgaggggattttcgtaatgcgtattattctgcttggcgctccgggcgcgggtaaaggaactcaggctcagttcatcatggagaaatatggtattccgcaaatctccactggcgatatgctgcgcgccgcagtgaaatcaggctccgagttgggcaaacaggcgaaagatatcatggacgccggtaaactggtgaccgatgaactggtgattgcgctggttaaagagcgtatcgcccaggaagactgccgtaacggttttctgctggatggtttcccgcgcacgatcccgcaggctgacgcgatgaaagaagcgggtattgtcgtggattacgtgctggaattcgacgtaccggacgaactgatcgttgaccgcattgtgggccgtcgcgtacacgccgcctctggccgcgtttaccacgtaaagtttaatccgccgaaagtggaaggcaaagatgacgtcaccggcgaagatctgacgacccgtaaagacgatcaggaagagaccgttcgcaaacgtctggtggaatatcatcagatgaccgcgccgctgattggctactaccagaaagaagcggaagcgggcaacaccaaatacgctaaagttgacggtacgcaggccgttgccgacgtgcgcgcagcgctggaaaaaatcctcggttaattttttcgcgtagtgaaccgcttatcaggcctgccattatcccgcaagcctgataagcgtagcgccatcaggcaatcggtgccggatggcggcctgaacgccttatccggcctgctggtatcgttagcgccattcggcgaattctcgtcttacctctcgcagcaattagttcttctttatcacttttccgctacaattatcaacaatttgaatagataagaggcggcaatgcgtcagacgaaaaccggtatcctgctggctaaccttggcacgccagatgccccaactcccgaagcggtaaagcgctacctgaaacaatttttaagcgacagacgcgtggtggatactcctcgtctgctgtggtggccgctgctgcgtggcgttattttaccgctgcgttcgccgcgcgtcgcgaaactctatcaatctatctggatggatggcggttcgccgctcatggtatatagccgcgaacagcaacaggcgctggccgcgcggttgccagacacgcccgtcgcgctggggatgagctacggttcgccctcgctggaaagcgctgtcgatgaactgttagcaagcgacgttgaccatatcgtcgtgctgccgttgtacccgcaatactcttgctcaacggtgggcgcagtctgggacgaactggggcggatactggcgcgtaaacgtcgtattcccggtatctcatttattcgcgattacgcagatgacagcgcttatatcgatgcgctggcgaaaagcgcgcgtgagtcgttcgccagacacggcgagccggatgtgcttctgctctcctatcacggcattccacaacgttatgcggatgaaggcgatgactacccgcagcgctgtcgcgataccacgcgcgaactggtttccgcattgggactgccgccggaaaaggtaatgatgacgttccagtcgcgctttggccgtgaaccgtggctgacgccgtacaccgatgaaacgctaaaaatgttgggtgaaaaggggactggccatattcaggttatgtgtccgggatttgccgcggattgtctggagacgctggaagagatagcggaacagaaccgcgagattttccttgaagcgggcggtaaaaaatatgcgtacattccggcgctgaacgcgacgccggaacatattgatatgatgctgaaactcacggcgccgtaccgttaacgcggtgtcttcatcctcgccataaagaagcgtgcgccgtcctgcaaggcatcgtcggcgattgtcatcattcgcgaatagtgcaggaaggcgtgcagtgtgccgggatacattttgtattcgcagggctgctggtgcgcctgtaatgtcttgtgcagcaagcggctgtcatcaatgagcggatcaaactccgcgctggcaataaagcagggcggcacatcgcgcgtgagatcgttattaaacagacaataccagggcgattcccgatcttcatcgttacgcagataggccttttcgtacatgtccagatcttcacgcgtcaggccgtcccacgcgccgccgaacagacggcggcttaccgaatcctgcaacccatacagcccataccacaacagaatcgcgataacgttaccgcagcgaatgtgcttatcacgtagccagagcgcgctggcaagcgccagcatggcgcctgcggaatccccggcgaaaccgattttctccacgttgagcgagtattcatcggcatgttgagagaagtagctgcataccgcgacggtttcttcaatggcctgcggataacgcgcttgcggcgacagcgaataatcaataccgatcacggtgcagccggtataacgcgccagcagacgcattatccggtcatgcgtatccagattaccgaggataaatccgccgccgtgcagatagtataaggtggcctgactggtcggctgcggcgagtagagccgggttgttacatcgccataaggcgtagggacggcgcaggtgcgggtggtcatggacggcgcgtcggcattccagaaacggcgctcaagaagataatactgacgctgggtctcaatatcgccatcggcaggccaggggggaaggcctggttgctggaagtttacgacggctttcatttcgtctgacagtcgggtgagtacgggaattttattttccggcttcataaaacgctccttgtgaaagtgaaccattgtaaaaaacgcggctggagaagctgcgatctcgtcgtccgatattgaaacgccatcgtccgtcgcgcgcagcagggggaatgtgctaccatgcagcgctccgttattcatccgtaagcacaatcatgaaatttcccggtaaacgtaaatccaaacactattttcccgtcaatgcgcgtgacccgttgttgcaacaaattcagccagaacaggaaaccaacgcctcctgggtcgtcggtatcgaccagacgttggtggatattgaggcgaaagtggatgacgattttattacacgctatggattaagcgccgggcattctctggtgatagaagacgaggtggcggagaagctgtatcaggaactgacgcgggaaaatctgatcacccatcagtttgctggcggcactataggcaatacgatgcacaattactcggtactggcggatgaccgttcggtgttactgggcgtgatgtgcagcaacattgagattggcagctacgcttatcgctacctgtgtaatacttccagccgtaccgacctgaattatctgcaagcggtagatggcccgattggccgctgtttcacgctgattggcgaatccggcgagcgtaccttcgctatcagccccggccatatgaatcagctacgggcggaaagtattccggaagcggtgatcgctggcgcctccgcgctggtgttgacctcatatctggtgcgctgtaagcctggcgaaccgatgcctgacgcgacgatgaaagcgatcgaatacgcgaaaaagcataacgtgccggttgtcatgacgctgggcaccaaatttgtgatcgccgataatccgcagtggtggcaggcgtttctcaaagagaatgtctcgattctggcaatgaatgaagaagaagcggaagcgctgaccggcgaaaacgacccgctgctggcggcggataaggcgctggactgggtcgacctggtgttatgcaccgccgggccgatagggttatatatggcgggcttcaccgaagaggaagcaaaacgtaaaacccagcatccgctgctaccgggagctattgctgaatttaaccagtatgaatttagccgggcaatgcgccataaagattgtattaatccgctgcgcgtttattcgcatattgcgccgtatatgggcgggccggaaaaaatcatgaacaccaacggcgcgggcgatggcgcgctggcggcgctgctgcacgatattacggcgaacagttaccatcgtagcaacgtaccgaactccagtaagcacaaatttacctggctgacttattcgtcgctggcgcaggtgtgtaaatatgctaaccgtgtcagttatcaggtactgaaccagcattctccgcgtctgacacgcgggctgccggaacgtgaggacagcctggaagagtcgtactgggatcgctaatctggcttgcccgatggcgctgcgcgcatcgggccgtccgacaaacccttaactggcgacgacttcacctgcgggcggcgtttcaagcagttccagcatcgcccgggcaatttctcgctcgcccatcactacctgattggctccccgctcggtaatatatttcacttcatcatcatagtgcgcgcgggcgattatctcgatatcaggacttttttcccgcgctgaggcgacaatctcgccggcttcgtacccgttggggatggtcaataatagccagcgggcgcagtccagatgcgccagattcataatttcttcgttagcggcgttgcccagcacggcgcgaatcccgcgttcgcgcagttcatccacgcgggtacgggacgtttcgataaccaccagcggaatccccgccgccagtaatttttctcccagcagactgcctacgcggccaaaacccaccagcagggcatgattacagatatccaccggaatttgcttctcttcttcgatagcctcttccagagtttgctcttccagcgtttcggttttcgccagatacttctccagcagggtaaacagtacgggattaagcataatcgacaaaatagcgcctgccagcaccaggttctgtcccgcttgcggcagcaggttgagcgccatgccgagtccggcgagaataaaggcgaactcgccgatttgcgccaggctggcggcaatggtcagcgcggttcgcggcgagtggccgaacatacgcaccaggaaaaacgcagcgatcgatttaccaaagacgataatggcaagcgtcgccaacaccgccagcggctgttggatcaagactaacggatcgaacaacatgccgacggaaacaaaaaacaggacggcaaaggcgtcgcgcagcggcaacgtatcgtgcgccgcccggtgactcagctccgactcattaagcaccattccagcgaagaacgcgcccagcgcaaaagagacgtcaaacagttctaccgcgccaaacgcaatgcctaacgccagcgccagtacggaaagggtaaacaattcgcgcgagccggtggcggcgctgcgagccataatccacggcaccaggcggcgtccgaccagcatcatgatggcgataaacgccaccactttaccaatggttatccccatatcgactgccagcgaggctatgccgacatcgcctttttccaccatgccggcaacggcgggcagcaagaccagcgtcagtaccatcaccagatcttcgacaatcagccagccgatggcgatttgcccgcgctggctatcaaggagttgccgctcctcaagcgcgcgcagcaggacgacggtactggcggtagacagacagagcccaaaaacgatgccggtcattaatgaccatcccagcacggcggaaagcgccatacccagcagcgtcgccaccgctatctgagcgacagcgccgggaatggcgatagactttaccgccatcaaatccttcagcgaaaaatgcagcccgacgccgaacatcaatagaatcacgccgagctccgccagctccggcgccagtttggtatccgcaacaaaacccggggtaaaaggtcccgccagaacgcccgctaacagatatcccaccagtggagaaatacgcaatttgttggcaatcatgccgagaataaaagcgagcacaaggccgccgacaatggtggtgataagcggggtagcgtgatgcattccgtctcctttggttgctggactccaaaactccgggtaatagtttatgacaatttcaatcaggatgtttataaaaaatggttgtgttttataaaaagatacgatctgaaggcaaaaagagcacggaacgtaaaagtgataagtatgggatggacaaagcaagatggcatcaggatgtacaggcggttaaagcgtacctttaaccgccataaaatcacgatttatgtcgattatcaggtaagaatatggtcagtatccccagaagcggcaggaaagcacagattttataaactaaatagatactggtatggtcggcaatcagccccagcaccgctgcgcccaggcctcccatcccgaaggcaaacccgaaaaacaggccggaaaccataccgatgcgtcctggcagcaactcctgggcatacaccagaatggcggaaaacgccgacgctagaataaagccgataatcaccgttaaaatccccgtccagtacagcgtggcgtagggtaaaacaagggtaaacggcgcgacaccgagaatagagccccaaatcacatatttcctgccgattttgtcgcccaccggcccgccgataaccgtcccggcagccaccgcaaacaggaaggcaaacagatggagctgcgcgttttgtattgataatccgaatttttgcatcagataaaaggtgtaatagctactgatgctcgccatatagaaatatttcgagaaaatgagtagcaataatacgctgaccgccagcacgactttattgcgcggcagcgggttagcgattatcgcttttggcttgcctttcgctatccggtgctgggctgcataccagcggctgatctgcgccagcaccacgatcgccagcagcgcggccagcacaaaccaggcgacattccctttgccatagggcgcgataatcacggcggccagcagcggccccaacgaactgccgaagttaccgccgacctggaagatagactgcgccagaccatgacgtcctccggaggccatgcgcgccacgcgggatgattccgggtgaaaaacggacgagccggtacccaccagcgccgcagcgagcaatacgccgccaaaacttcccgccattgccagcagtaccagcccgctcagggtaaaacacatgccgacaggcagcgaccacggcatgggatacttatccgtccagtagccgacgaccggttgcagtagcgatgaggcgagctggaacgtcagggtgatcaaacctatctggacgaaagtcagcgaaaactccgcctgcaacaggggataaatggctaagattagcgactggatcatatcgttcagcagatgggaaagactgatcgcgcccaaaataccaaacgaagtacgtgctttagcggccgctgcgggcgcgccggctaacggctgggttggttcactcatggccatagaaagtcacttaaattttatgcgatgttggagatagtaggatgtgtaattattacttgcctaacatacctgtgaaatgtgtttgaaggaagtctcaattctgaaaacatatttgtctattattgcaaggaaaggtaatttctgcggttgatattgagtcagggagagaaagatgaaatttttgaaacggggtgtggcgctggcgttactggcggcgttcgcgctgacgactcagcctgcacaggcttacgaaaaagataaaacctataaaattactatcctgcataccaacgatcaccacggtcacttctggcgcagcgaatatggcgaatatggcgaatatggtctggcagcgcaaaaaacgctggtggacagtatccgtaaagaggtggcgcaagaggggggaagcgtcctgttgttatccggcggcgacattaataccggggtgccggaatccgatctccaggatgcggagcccgatttccgcgggatgaatctgattggctacgacgctatggccgtcggtaatcatgaatttgataacccgctcaccgtattgcgccagcaggaaaagtgggcgaagtttccctttctttccgccaatatttatcaaaaaagtaccggcgagcgtctgtttaagccgtgggctatttttacacgccaggatataaaaatcgcggtaatcggcttaaccaccgatgacacggcgaaaataggcaacccggaatatttcaccgatattgagtttcgtaaacctgctgaagaagcaaaggtggtgattcaggaacttaatatgaatgaaaaaccggacgtgattatcgcgaccacgcatatgggacattatgacaacggcgatcacggttcgaacgcgccgggcgacgttgagatggcgcgtagcctgcctgccggttcgctggcgatgattgtgggcggtcactcacaagacccggtatgcatggcgtcggaaaataaaaaacaggtgaattacgtaccgggaacgccctgcgcgccggataagcaaaatggtatctggatcgtgcaggcgcatgagtggggtaaatatgtgggccgcgcggatttcgaattccgtaacggcgagatgaaaatggttaactaccagcttattccggtaaatctcaagaaaaaagtgacctgggataacgggaaaagcgagcgtgtactttacacgccggaaatcgccgaaaatccgcaaatgctcttgttattaacgccgttccagaataaaggtaaagcgcaactggaggtgaaaattggtagcgtgaatggccttcttgaaggcgatcgcagtaaggtcagatttgtccagaccaatatgggacgggtgattctggctgcgcagatcgcgcgcaccggcgccgattttggcgtgatgagcggcggcggtattcgcgactcgattgaggcgggagatattacctataaaagcgtgctcaaggtacagccgttcggcaacattgtggtgtatgccgatatgagcggcaaagaggtagttgattatctcaccgccgtagcacagatgaaaccggactccggcgcctatccacagttcgccaatgtgagctttgtcgccaaagagggcaagctcaccgagctgaaaatcaaaggcgagcctgttgatccggccaaaacctaccgcatggcgacgctgagtttcaacgccacgggcggcgatggttatccgcgcatcgataacaaaccgggatacgtgaataccgggtttattgacgcggaagtgctgaaagagtttattcagcaaaattcaccgctggatgcggcggcgtttacgccaaaaggcgaggtgagctggctgtagcggtacggatagccatttctgcctgatggcgcgcagccttaaggcctacggattatgtctgctgtaggccggataaggcgtttgcgccgctatccggcaatgtattttacgcaggcttaatcccgacgcgcgatatcagcgaatttagcacccagtatggcggccaaatcgtcagccgccagttcaatatccagcccgcgtttaccaccggaaacataaatagtggcaaacgtgcgggcaggcgcgtcaatcagcgtgggcagccgtttcttctgtcccagcggactgatcccgccgaccagatatcccgtggtgcgttgcgccaccatcgggtcggccatatcgacctttttcgcgcccagagctttggcgacttttttcaaatccagctgtccggctacaggcgtcacggcgacggccagttgcttcatatcgccattcacggcgaccaaaagcgttttatacacctgatcggcgtttagcccgagcttacgcaccacttcatcgccaaagttagtttcattcggatcgtgatcgtaggtgtgaatgttaaacggaatcttgtttttttcgagtaacttaactgcgggtgtcataacgttccttcttactacagacgtgatttgccatcagcatacgcccgaaagcggactaaaaaatagtataatcttgtgcattaggtcttggcagttgcggcaactttgagcgacaatctgaagatccgaagcgaaagcgtcgggataataataacgatgaaattcctctttgacgggccaatagcgatattggccatttttttatttcaatatttgcggtaggttgccttcgccgtacagatgtagcgcccctacggctaccacgtagcgtcccggcggcagtgccagcagcgcgtcgcgccaggcttcattgcgtttcaccatcagtacatcatacagcggctggctaaacgttctggggagcgaagcgccgacgctggtcggcggctgctcaagccaccagccgatcatcacctgcaaaagccgtgcgttggtgtgccagtgcgtcagcgtgtcgtcgagcagcgccatcccgccatcgggcagatcgcatagtagttcgagctggtgtttcgccccttccagctcttgcaccggcagcgacatttcgcgggcagcctgtaatagctgataatcaatgccatagtccggacgcaatcccagccgttgcgcctgcgtggcctgtagcaccatagctatctgccataaaggttgattatcaaaatggatcagcggcatacccaactcgctgacccgtttttccagtgcgcttaactgcccggcgctgagacgttcgaccaacggcgggcatttggggagattgctgaatggcgtttcgttaccagaaatatccgcttcaacgaccagcgcgtcggcctggcgtagctttttcaccagctttgctggaagaggagccatatcgcgcgtccccatatgaatactgccaaccagatgcagatgacgaccgccgggcagggagagatcgatagcaggccaactatttggggtaccacgcagcgcgcgccataaacgtttaagttgatttaatagcttcatacgcgctccctttgaaaaagctcatgctagcgcgttggagaaaagggcgcaatgcgccctgacgggacgtcaacgatcggtcgggttattcgctgccgtcgagataggccgttctggcgatggtcatttcaagctggcatttataaatactgatgcgcttttcagcgggtatggcctcggattttgcatcgctaagtttgccgcactgctgctcttttttggtcacccagactcgctgttcttgttttaatgccgttcgggcagaggcgggtagcgatttccagacctgattaagctcgcgatctctactctcaaatttctttgctgcgatttcaatcagtgagttattttttttctttataatgctatcaccagataccgtcattcttgccattacataaatagaccgcgccaatttatcggtttttggcacaggggtgacaacaatatctttgttgttgtctgctagctgaatattgtagttaacctgtttccaggtcaccgtattgtttattacctgtccatccccttgtgaaatatagaatagagtgtttggtaagtctttcattaatttaaataatggctgaggaatacccatggcgacggtagccgagcaagttcgtaagttggcattttctgcttgagggttctgcgtgattacatcactgaattgaacaggaatagcccggagttgttgctcgtattgagtctgggggatatcgaagaaaagcgtggagggctctttaatatagtcttgctgtaaacgacctaatgcttcattgtaaatccattcttttgccgccgtgactgcattatcgttgccacattttaactctggagtggaatcaaataaccctgcataactgacggcgggagaaagcaggaaaagaagcgtaactgcttttctaaacataaataacacatccttatgattcaaaaaaacattataaaatgttgttttttatttttctacaggatgtgcggttaaatttttatatattgatacggtaaattactgatggcttaataatatatcaggcagctgatgctgcctgatatagcgtttttacgctttcggtttaaaacgcaatagccggttggcattgctgacgacggtaatggaagacagcgccattgccgcgcctgctactaccgggtttaacaaggtaccggtaaacggccacagaataccggcggccaccgggataccaatgctgttgtagataaatgcgccaagcaggttttgtttcatattgcgcaacgtcgcgcgcgaaatggccagcgcatccgccacgcccatcagactatggcgcatcagcgtaatcgccgcggtttcaatcgccacatcgctgccgccgcccatcgcgataccgacgtccgcctgcgccagcgcgggcgcatcgttgataccatcgccgaccatcgcaacctgacgaccctggctttgcaggcgtttaatcgcatcggctttgccatccggcagaacgcccgcaatgacttcgtcaatacccgcttctttggcaatcgcgttagccgtcgttgggttatccccggtgagcattaccagacggtatccggcgttgtgcaggcgttcaagcgcggcaatactatcgctgcgcaatggatcgcgtaccgccagtaacgccgccgctttaccgtcaatcgccagcaggaccggagtcgagccttgcgaggcctgcgcggtgatttccgccgtcatgtcatccgtggcgacgtgctgttcgttcagcaacgcctggttccccagaagcagttgatgaccttccgcttcaccgctgacgcccagtccgcgcagcgttctgaaaccgttcacctgcggcagtttatcatcgccggctttttccagaatcgcatgggccagcgggtggctggagccttgttcgagcgcggcagccagacgtaatgcctgagcttcctcaacgccgttaaaggtttttatcgccaccacttgcggcttgccttccgtcagcgtcccggttttatcaaaaacgagggtatccaacgtactggcgcgttgcagggcatcggcgtcgcgtaccagcacgccgaattcggcagcgcggcctacgccggaaataatcgacattggcgtcgccaggcctaatgcgcaagggcaggcgataatcagtacggtggtggcgatgaccagcgtataaacaatttgcggcgccggcccgaagaaataccagatagcggcgctgaacagcgcaatggccacgacgacgggaacgaataccgcggagattttatcggccagttggccaatttccggtttactgctctgcgcctggcgtaccatgcgaataatgcgtgacagcgtggtatgactgcccaccgcgctggcgcggaacaggacgctgccgtcctggacgacggtgccggcatgaacgctgtcgccttcgcctttttgctgcggaatgggttcgccggtcagcatggcttcatcaagccacgcttcgccctgggtaatttcgccatccaccggcacgcgatcgccggtagtgagccgcagcagcatccctggctgaacgtccgccagcgggacgcttttttcgccgtcttctgtcacgacgcgtgcggtgggcggggtgagatcgagtaatttttccagcgcttttgaggaacgctgacgggcgcgcgcttccagcatgtgtccgagattaatcagaccgataatcatcgcgctggcttcgtaatagaggtgccgtgcttccatcgggaaccactgcggccacaggttgacgctcatggagtagagccaggcgaccccggtgccgagcgccaccagcgtatccatcgtcgccgtgccgttcagcaggcttttccacgcgttacggtaaaagtgaccgcccgcaaagaccatcaccgcaagcgtgatcaggccaatagccagccacaggctgcggttgtcgccggtcaccatcatgttatcgccgatcatcccccagaccatgaccggtataccgaccgccagggcaacgatggcctgccagcgaaaacgtttcatggtggcgatggcggtttcctgctggcgctcgcggcgtttgatgtcatcttcaatcgcctctgcgccgtagccggctttttccaccgcctgcactaaatcagcggcggacgcgctgcccatcaccagcgcagtgcgttccgccaggtttacccgtgcctgcgtgacgcccggtacgctttgtagcgcatgttgtacgcgggtgacacaactggcgcagctcatgccgcttaacagcaactgttggctttcttcatcggccgtcgctaccggaagctcatgaggaaccgctgccagtgcttccgacgggattgatgactccgtcagcggtttagcctttgggtggcttaacgtcgcgccatacccggcttgtttgatggtttcaattaacgcgtccgcactggcggtaccggtaacgtgcgcttcggttacggtgacgtccgccagctcaacatccggacgttgttcaagactttctttcacgcgtttaacgcaatgaccgcaggacaaaccgtccagggtcaggtcgatagtttgagacatagtaaaaactcctttatgattggtcatcaattcattgaccttagtaatcgtagtgactcactgtgataaaggttaaaccttccagcaaggttaaggtcaagggggaaatatgaatattagcgatgtggcgaaaaaaaccggtttaaccagcaaagccattcggttttatgaagagaaagggctggtgacgccgccattacgtagcgaaaatggttatcgcacctacacgcagaagcatttaaacgagctgacgttgctgcgacaggcgaggcaggtggggtttaatctggaagagtgtggcgaactggtcaatctgtttaacgatccgcgacgccatagcgcagatgtgaaaaagcggacgctggaaaaggtcgcggagatcgagcgccatatcagcgagctgcaatcaatgcgcgatcaactgctggcgctggcggagagttgtcccggcgatgacagcgccgactgcccgattattgataatctttccggctgctgtcatcacaaggcgcaaaagccacgttgattaaacggcacgaatgcgtaaggtgatgccttccacggcgatcacttcgacatgcgtacctgcgcgcaggtcttcgtcagcgcataccggccacgagctgtcgccgacacgcatatgaccccgtccgttaactaacgcggcatcaagcataaaccggcggcctaccagttgttgtccgcgttggttaaggcggctgtcggtcggcttctgctcccgcacgcgacgcgccagccagcgccaccaaagccaggccgccagtaacgttaaggccgcaaacagcacgccctgccattcccagccgagcggtaagagccagacggttaagccggtaatcactgccgccacgccgctccacagcaaatagccgttaccgccgagcatttccgcagccaacaacaggccgccgaggctaagccagaagatatgcggatgtaccagaatcatcgctatcatgcttttttccgttcgctggcgctgtccttaaccagctcgctgatcccggcgatagcgcccatcagactgctggcatccagcggcatcatgaccactttgctgttattcgccgagccgatttgctgtaacgcttcggtgtatttctgcgccacgaagtagtttattgcctgaatatccccggcggcgatggcttcagacaccatctgcgtagcgcgggcttccgcttcggcggaacgttcgcgcgcttccgcctgcaggaaagcggactgacgttcgccttcggctttcagaatctgcgactgtttttccccctcggctttcaggatttccgcctgacgcaccccttcggcctcaaggatataggcgcgtttggtacgttccgctttcatctgggcgttcattgaggagatcaattccgcgggcgggcggacatcgcgaatttcgatacgggtaactttaattccccacggattggtggcttcatcgacaatatgcagcagccgcgtgttgatgctgtcgcgctgggagagcatttcatccagctccatcgaaccgagcaccgtacggatattggtcatggtcaggttaatgatcgccagttccagattactgacttcataggcggcgcgcggcgcatcgataacctgaataaaacagaccgcatcgatagtgacgttggcgttatcttttgagatcacctcctgcgacggaatatccagcacttgttccatcatattgatcttgcggccaattctgtccataaacggtacaacaaggcttaatcccggctgcagggttttggtgtaacgtccaaagcgctccaccgtccactggtacccctgcggaacgattttgacgcccgcgccgacgatcaccagcgcgacgaaaatgagaatagggataagaatgagcatagctaaacctcctgttgcgttgtccataaaccgattttgctgacgaattaagcgaattatacctgattcagtaaagcatgttccccccttattaattacagggatacactatcgctataaaaatatgaacaacggatgcgcaataaatgacagaacgtagcatgttgcttgagttaaagcaggtcggttaccggactgcgacgacaaaaatagtgaataacatcagttttacgctgcaacgcggcgaatttaagttaattaccggtccttctggctgcggaaaaagtacgttgttgaaaatggtggcctcgctaataagccctgatatcggcatgattctttttgaggggcaggatattactactctgagtccggaagcctatcgccagcaggtttcttattgcgctcagacgccagcgctatttggcgatacggtttacgataacctgatttttccctggcaaattcgccatcagcgcccgcagccgacagccttcgcagacgatctggcgcgttttgaactgccggatacgattctgcaaaaaccgattgccgcgctttccggcggggaaaaacagcgtattgctctaattcgtaatctacagtttctgccgaaaatactgttactcgacgaaataaccagcgcgctggatgaacataacaaacggaatgtgaatgatattattcatcgctatgttcgcgataagcaggtcgctgtcttgtgggtaacgcatgataaagatgaaattcaacacgcggataaggtgataacgttaacgccatctgccggagagatgcaggaggcgcgttatgaacgagcataatattaccaatacctcgctggcgttatcgatgctgctggtggtggtcgcgatgctcatcagtcacaaggaaaagctggcgctggaaaaagatattctgtggagcgtatgccgggcggtgatacagctcattattgtcggctatgtactgaaatacatctttggcgttaatcatgccgccctgacgctactgatggtgctgttcatctgttttaacgccgcatggaacgcgcaaaagcgcagtaaatatatcgataaggcatttctctcctcgtttatcgccatcaccgtcggcgccgggctaacgctgacggtactggtgcttaccggttcgattgaatttgcgccgatgcaggtgattcccatcgctggcatggtcgccggtaatgcgatggtagcggtagggctgtgctacaaccaactggggctgcgttttcatagcgagcagcagcaaatccaggaaaagttaagtttgggcgcaacgccgaaaatggcctccgccgggcttatccgcgatagcatccgcgcatcgcttatcccgacgatcgactcggcaaagaccgttgggctggtgagcctgccggggatgatgtccgggctgatttttgccgggatcgatccggtaaaagcgattaaatatcaaattatggtaacgtttatgctgttgtcgacagccagcctgtctaccatcattgcctgctatttaacctaccggaagttctataattcgcgtcatcagttggtagtaatgccgctcaagaaatcatgatagttgccggatgatggcgcaagcgccttatccggcctgaggacgacaggtaggccagataagcgcgccatcaggcaagagaggattaatacagtagcgcgtacaactggcggcggtatttcgacgccagcgcatcgccggtgccgagcgcggcaaggatctcctggaaggttttgcgcgtctgtccctcggcggcggcaagatcttttctcagatggctgaacagcaattccagcgcttcttcattacgtccgacctggtgcaactgcaacgccagttgcgttgccaaagccgcatcctgcggattctccgcgacttgctgctgaagttgctgaatttccggcgtatccgccgcctgtttaagcagttcgatctgcgcaaccagcccctgataacgggtatcctgatcctgtagcggtatagtttttaacaccgcttcggcctcttcagagcggttcagcgcaatttgcgcttccgccagtaacaggccaatctcaccgttctgcgaagagagctgccaggcgtctttgagcaacggcagcgcgtcaatgtagttgccctcctgcattaactgcatcgcttgttgcgcttttagctcttcttcacgcggcagtactttatccagcagagcgcggattgcctcttccggctgcggcccctggaaaccatcgaccggttggccattctggaacagatagacagtcgggatggcgcgcagaccaaactgagcggcgatcatctgttcggcgtcgcagtccagctttgccagaataaactgaccgtggtactgggcagccagactttccagcactggcgttaattgcagacagtgttggctgcgttcagaccagaaatagaacagtaccggcgtggtcatggactgctctaaggtctgctgcaggttggattcattaatattgacaatgttctgtacggacatggcgtcgctctcttttgtctgtgtcacgtttacatgggggctgacgggcgcgcttcaactcagctttgtaaaattttatccagcatccggcccggcaataggcgtttcagcgccatcactgcccaggtgaccagcgtaacgggatagcgcagcctgggtttatcgcttgcaaaagcatgacgtactttcgctactaccgcgtcaggatcgcgggtgaaacgtgcggcgatgccgggattttctaccggtttatcacgctgcgtctggttaacgttatccgtaaaacgggtacgaatcggccccggttctatcaggctcactttaatgcctgtgtgccgtagctccatacgtagcgcgtcagaccaggcttcgagcgcgtatttgctggcggcataagcgccgcgccctggggtggaaatcagccccatcaccgatgaggtcatcacaatgcgtccttcgccatgcggcaacatggcgggaagtaagcgcatagtaagctgatgcgcgccgaagaaattactggaaaactgttgctccatctgctcacggctgatggtggaaagggggccatacacgccgtagccggcattgttaaagatcccatacagacgattatcggtcagggcgatcacttcatcggcggcacgatccacgctttcaggggagtcgagatcgatcaacacgccggtaaatcccatactgttcatccgggcgacatcatcaggtttgcggcagcccgccaggatttgaaagccctggcgtttaagttcaagcgcgctgtccagaccgattccgctggaacatcctgttattaagaccgatttttgcataactttacctgtcaggatctccgttgatttaagagtcgtggttaactatatccgtcatacttcaagttgcctgtgcgttcgtttactccagtcacataggtatctatgctcctggacattctcttacgtgccgccttcatgcaactcgaattattcaggagagaaaaggggtcaactgcttcgccatccagtcggcaataaacggctgggcgtcgcggttgggatgaatgccgtcatcctgcatccactgtggtttcagatatatctcttccataaaaaacggtaacagaggaatatcgaactctttggcgagcttaggataaatggcgctaaaggattcattataacggcgaccgtagttagcgggcagatgaatttgcatcagtaacggttgggcatcggcggctttcaccgtctgaatgattttacgtagcgtctgttcggtttgcgcaggcgcaaaaccgcgtaggccatcgttgccgccaagttccaccactacccagcgcgggtgatgctgttgcaacagcgccggcaaacgcgccagtccctgctgcgaggtatctccgcttatactggcattaacgaccgacgttttgttttgccatttatcattaaggagcgacggccatgccgcgctggcggccatacggtaaccggcgctgaggctatcgcccagaattaataaggtgtctgcggcggcggcacggaaagttaacaggatcaaaaacaggaagggcaaatgccagcggaaaacagtgttgaagttcatcgtctcaggaagtccgtcggtcagggtgagcatgagctttccatccttaccggaattgaactggttgtcaaacgcggcgaaaccattgcgctgattggcgaatcaggatcgggaaaatctacgctgctggcgattctcgccggactggatgacggcagtagcggagaggtcagtctggtcgggaaaccgcttcaccagatggacgaagaggcgcgggcgcagcttcgcgctcagcatgtcggttttgtttttcaatccttcatgcttattcctacgcttaacgcgctggaaaacgttgaactaccggccctgctacgcggtgaaaacagcggtcagagtaaggcgggggcgaaagcgctgctcgaacaactgggactgggaaaacggcttgaccaccttccggcacagctttccggcggcgaacagcagcgcgtagcgctggcgcgcgcgtttaacgggcgtcctgatgtgctgtttgccgatgagccgacgggcaaccttgaccgtcagaccggagataaaatcgccgacctgctattttcgcttaaccgcgagcacggcaccacgctgattctggtgacgcacgacccggcgctggcggcgcgctgcgaccggcggctgcggttggtcaacggtcagttacaggaggaggcatgatagcccgctggttctggcgcgaatggcgctcgccgtcgctgattattgtctggctggcgttgagtctggcggtggcctgcgtactggcgctcggcagtatcagcgaccggatggaaaaagggttaagtcagcaaagccgcgagtttatggcaggcgatcggacgctgcaaagttcgcgggaggtaccgaaagcctggcttgaagaggcgcgtaaacgcggccttaacgtgggcgagcagttaacctttgcgaccatgacgtttgccggcgatacgccgcaactggccagcgtgaaggcggtagatagcgtttatccgatgtacggcgaattgcaaacccgtccaggcggagtgaaaccgcagccgggtagcgtactgctggcgccgcgtctgatggcgctgcttaatttgaaaacgggcgataccattgatgtcggcgacgtgaccttgcgtattgccggtgaagtggtgcaggaaccggattccggatttaacccttttcagatggcgccgcgtctgatgatgaatatggccgatgtggcaaaaaccggtgcgatacagccggggagccgcgtgatgtggcggtataaattcggcggaacgccgcaacagcttgctggctatgaaagctggctgttaccgcagcttaaaccggaacatcgctggtacgggctggagcaggatgacggggcattggggaaatcgctcgaacgttcgcagcagtttttgctgctttcggcgttattaacgctactgctggcggtagctgccgtcgcggtggcgatgagccattactgccgtagccgctacgatctggtggcgattttaaaaacgctgggcgcgggccgggcccagttgcgtaaacttattatcggacagtggttgatggtgctggggctttccgccgtcacgggaggcgcgattgggttactgtttgaaaacatattgctggtgctgctaaaaccggtattgcccgccgatttgccgcccgccagcctgtggccctggctgtgggcgctgggcgcgatgacggtcatctctttgctggtcggtttacggccttatcgattgttgctggcgacccagccgctacgggtgctgcgccgcgatgttgtcgctcgcgtctggccgttaaaaatttatttgcctgtcgcctgcgccgtcgtggtggcgctgctcgccggattgatgggcggaagtatgctgttgtgggcggttctggcgggtgcagtgatactggcgctgctgtgcggtctggtgggctggatgctgcttaacgtgctgcgcggcatgacgttgacgtcgctaccgctgcgtctggccgtcagccgacttctgcgtcagccgtggtcaacgttgagtcagctttcggcgttttcgctttcgtttatgctgctggcgctcttgctggtgctgcgcggcgacctccttgatcgctggcaacagcaactcccgccggaaagtccgaactatttccttatcaatattgcttcagagcaggtcgcgccgctgaaagcctttttggcggaacatcaggtgattccgcagacgttttatccgattgtgcgggcgcggttaaccaggataaacggtaatccgacggaaggtcagcaggatgagtcactcaaccgtgaactgaatttgacctggcaggatacgcgcccggcgcataacccgctggtcgccggtcactggccgccaaaaccgggcgaagtctccatggaagaggggctggcgaagcggctgaacgtcaaactcggcgatagcgtaacctttatgggcgatacccaggcgtttagcgctaaagttaccagtctgcgtcaagtggactgggaaagcctgcggcccaactttttcttcatttttccttccggggcgctggacgggcaaccacaaagctggttgaccagttttcgctgggagaatggcaacggcatgttaacgcagcttaaccgcgagtttcctaccgtcagcctgttggatatcggggcgatcctgaaacaggtgggacaggtgctggagcaggtcagtcgggcgctggaggtgatggttgtgctagtcaccctctgcggcatgttgctattactggcccaggtacaggtcgggatgcgtcagcgccatcaggagctggtggtgtggcgcacgttaggagccggaaagaaactgttgcgtaccacactctggtgcgaattcgccatgctgggattagttgccgggttggtcgccgcgattggcgcggaaacggcgctggcgatcttacaaatcaacgtttttgatttcccctgggagccggactggcgtttatggggcgcactgccgttttgcggcgcgctgctgctttccgtatgcggcggctggcttggcgttcgtttgctgaaaggcaaagcgctattccgacagtttagcggatgattcatgatgtgaataatttcgcgccggtttttaaaacggcgcgtacttttttagtcgcacaaattgctaactccttgatttttagtagcacaaatcattaaaaaatacacaacacgtaaggttttataacagttattatttgcctgctaaatgatttggattggctatctatcaaggaaaatataatgacaattaaaataacagcgttggcggcatcgatcggcgcggcagtggctttcatgcctttcgccactcaggcggaaatcaccgttttaaaacaagatccccaggcgggtaatccactcagccgactcaatttcaccgttggcgggagtattcgtccgcagttccagaatatgaccggtaatgacggcgcgaacggttataaacgtaatggttttgatggcgggacgcgtttccgcttcgccgcggattattatctgtttgatgatatcagttggattagctattacgagctgggcgtcaatatccctgcggtatttgactgggataaccattatgcgaagggcgcgactgataccactcgccgtatgctgtataccggcttcaagagcgcgacgtggggaacgctgaccttcggtcaacagaacagcatttattacgatgtggtgggcgtaaaaaccgatatctgggattacgacatgataggtcaggcgccgggcaacgggattaacggcgactacgatggttcttatcgcacgcgtaagtcattgaagtataagaaaagcattggcaatgtcgatctctacgcatcttatctgttcagcgacgattataatgccaataacggcctgaattacaagcgtaaaggcggcggttctttaggcgcggattaccatctcaccgacgatctgacctgggggacggcatggaactatacccgtgcggagatgcgtggcaacggcaataaaacttacgatcaaaatattgtcggtaccgcattaagctggacgccggaaaactggactatcgccgcaggcggcggttggtatcagaactttatgacgaccaaaaaagtgtctgtgaatgattactttgccggcgatgcgtggggtctggaatattttgtcggttacgctttcccgattggtcagtatgccgtgaaagctattcaaccgtactttatgggcgaccgcattgaatatgtgaatggccgcgactatctgcgcaccgataacggcgtggggatcaccttccaactggattatggtttccgcgttgattatgaacatgttttcacctccagcactgacaatctgggcgatatgaacctggtgcgtctgcgttacgatttctaaagcgttttcctgtgccggatgttggcgttaagacctcttatccggcatttccctttacgccattcccgcctgacacacgcctgagcgcctgcctcgtacatttaacgacacaccaggaaacatcatgaaataatttcaaggacagcaggctgtgatctgtgtcatgttaagaaatagcctttcgtttgggccaaaacagacgatgccgcatgaacggcatccggcacagcatcacactatttaaaatggagaaattatgggattgcgtcagagtttacgcattgcggccagcacgctattactggcctgcggattacagtttgcccatgccgatagttccccgcaaacgatcgtatttggcgtcgcgccagggccgtatggcgacatggtgaagcaggcgattgcgccgacattaaaagaaaaagggtataaggtcgtggtgcgcgagtttagcgactatgtccagcccaatatggcgttagctaacggcagcatcgacgccaacctctttcaacataccctctattttgacaaattcaccgctgacaaagggctgaagctcagcaaacttattgtggtaccgaccgctgggatgggcttctattcacgtaaaatcaacagtctggatgcgcttaaaaaaggggacattattactctctccaacgatccgactaacctggcgcgcggccttcgcttcctgcaatcgttggggctcatcacgattaaggacaatatcgatccgaccaaagcctctgaacgagatatcgccagcaatccaaaaggactggttttcaaaccgctggaagccgcacagctaccgcgcacgctggatggcgtgaccggcgcgctggttaacgggaactttgcggtggcggcaggactcgatctctccagcgcgattaagcaggaacacctggatgagaatctgaaaaatatcattgcggtacgcagtgaagatgccgataagccgtttgccaaagatattgtcgaggcggtgaaatcgccggcttatcgcgcggtcatcgacgatccaaagaatatttatagcgccttccagaaaccggaatggatgaccgcgacaccctgatcgcagcggtagccatccccaatttctgaggtgaatatgattgaaatagaaaaagtctgcgtcgattttaccgccggtcgcggtaccctcacgcgcgcggtggatgatgtgagcctgcatatcgccgcgggcgagatttttggcattgtcggtaccagcggcgcaggaaaaagcactctgctgcgtaccctgaacgccttaacgcgtcccagccaggggcgcgtcaacgttaacggcgtggaaatttctgcgctggacggaaaagcgttacgccaggcgcggcagcgtattggtatgattttccagcattttaacttaatgcatacccggacagtggcgcaaaacgtggcgtttagcctgaaagcggctggctgggaacgcagcaaaatcgcgccacgggtggcggaaattttaacgctggtgggccttgccgataaagcgaaccgttttccggtacagctcagcggcgggcaaaaacagcgggtggggatagcccgcgccatcgctaaccatccggatgttttgctgtgtgacgaaccgacttccgctttggatctggaaacttccgccacgattctggctctgctcagacagatcaacgcacagctcgggattactattgtgctgatcacccatgaaatgaacgtgatcaaatctatttgcgatcgcgtggcggtgatgtcgggcggtaaggttgtggaatcgggcgaggtgtttgatgtgtttgcccacccgcaacacgctttcacacagcaactggtgtctcatactcttaatttgaccctgccggaacgtttacgggaacacctgcccgggcagttgctgaaaattttgtttatcggcgattcggcggagcagccggtactgtcggaggtggcgatcaagtttggcgtcgcggtcaatatcctgcatggcaagattgaatatatcggcgaacgcgcgttgggcattctggtggtgcaattaaccgcgccgcataatccaacggcggtggccgccgccgtggagcatatccgtcaacgtaccgcacaggtggaggtgatccgtggatgatttattgccggatttaacgctggcgttcaatgaaactttccagatgttgagtatttcaacggtgctggcgattcttggcggtctaccgctcggttttctgatttttgtcaccgatcgtcatctgttctggcagaaccgttttatttatctcgccgcctcggttctggtgaatattatccgctcggtgccatttgttattttactggtgctgttactgccgctaacgcagcttttgctgggcaatacgataggcccgattgcggcctccgtcccgctgtcggtggccgcaatcgcgttttatgcacgcctggtagatagcgcgctccgtgaagtcgataaagggattattgaggcggcgctggcattcggcgctagtccgatgcgtattatctgtaccgtactgttgccggaagccagcgcagggctgctgcgcggcctgacgattacgttggtaagcttaatcggctactcggcgatggccgggattgtcggcggcggcggggtaggcgacctggcgattcgctatggctactaccgttacgaaaccgaagtgatggttgttaccgtggtggcgctgattgtgctggttcaggtcgttcagatgctgggcgactggctggcaaaacgtgccgacaagcgcgacagacactaagccggcttaatgtagcgtcagccggcaataaaaataagctattgcgcttttagccagttggcaacctcttgccatgtgccgcgaaaaacgatattcgcggcttttttctccagttgatagcgatacattgggtcgtaatattcgttaagtagcggaaccagccatgccatatggccgtcggtgctgccgctggataattgctctgccagcgccctatccagcgtgtccgtcagttcggcaaagcgttgcaaccccagacggcggcgaatagcgaacagtccatgatgaagatattcactatacgcctgccaaccggcttcatcgccgtaggcgtgggtgaagtcgtgatgcatacggatgaaatactcttcacgcagtcgttccagacgaagcgcaaacggatcttccactaccgcaatgggggcctgcgccattctttcgcgtaaacactcaggcagatggttggcgccgatcgttcgcccttcatcttccagtacccacctttttagcgtctgacgcgcgttaattttcagcaattcaacggcaagtttgttttcaaaactggcctggctgagctgggggttcagcgtgcggccaaaagaggagccgcgatgacgcgcgagaccttccagatccacgccgttgggctgttgtcgtaccagttgcgttttgccgctgcccgtacagccgccaattaaaagtatcggtttttgcgccagttgccaggtcgcctgaattgctgtctggcgcagcgctttatagccgccttcaataagcgggcagtcaatccctgtttcttgcagccaacgttgtacgatatgtgaccgctgaccgccgcgcgcgcagcacagatacccgttggggaaacgttgatacgcggctttccaggcctcaagccgctgctggcgaatgtcgccgcaaaccagccgatgccccagcgctaacgccgcatccgcgccctgacgtttgtagcaggtgccgacggcggcccgctcgtcgtccatcatcaatggcaggttgatagcgcccggcatggcgccctgttcaaactcaatcggcgcgcgtacatcaattaaaggcgtatcggcaaggaggagcgcgcgatagtcctgtgctttttgtctgtcttgcataacgtaaaacgtaaccttaaatcatcctttgcgctattttacgcgccaattcgcaaagtggcttgatttttaacagcgtaccgtgttgaaaatggataaaaaaccggctatttcgggttgtcgttgggtaaataatttcacaatgtcttctaccgctttgcctccgccaaatttatgccaggcgaggcttaacggtgagggcggacgcatcgtcgggatggtacagctcaccagttcgtttttgtcgatcagcgtttgacagagcggctgcgggacaaaaccgataccgacgcctgccagatgagcggcgattttggtttccatatcaggcacgataatttccttctgccccggaaggcgccaggctacccgcttggtcagcgtacgcgcgctgtcttcgatattaattgccgggaaacggcgcaactgcgcttctgttagaggcccgctgacgtgagctaaaggatgatccgcagacatcacaaaacgccattgtacggaacctaaagggtcgagcataaaggtattagccaacggctcggtgccagttacgccaatcgccagcgaaaaaccttcatacaggagcgaatcccagacgcccatataaatttgccgggaaaagtgaaactgagtgaaagggtaacgcgcattaagccacgataagagactggcgaccgcttgcgggctatagagcaggttattcaccacaatattgacctgacgctctacgccgtcgttaacctggcgtagctcgtcaggcatgctgtccaaccacgcaagccagtcttttgcctgagagagaaggtgagagcccgccgccgtcaacgagacgcttcgcgttgtgcgaaagaacagccctacgccggtattttcctccagcagtttgatgcggtagctaatggttgccgtggttttacacaggcgctccgccgctttggagaaactccccgtttcggcaacgctgataaaggtacgcagtgtttccgggtcaaacatcgtcagacgcctccttacgatcctgataaaaccagaattgttttcctatgatttttaagtagttttacataatagccatgtttgatttgtggtctaaatctacttttggaaaaatattccaacttttatgttgatgttaaatcccgaaggttttagattgcatggtattgaaaccggacagagtccaaaccgcggttaaacggaatcgagctacaagggaaaaataatgaaacttgaggtattaccgttagatcagaagacgttcagcgcttatggcgatgttattgagacgcaggaacgtgacttttttcatataaacaacgggttagttgagcgatatcacgacctggcgaaggttgaagttctggagcaggatcgcacgctgatcagtattaacagggcgcaaccggccgcgatgcctattgtggtacatgaactggaacgtcatcctttaggtacgcaggcgtttgtgccgatgaacggcgaggcttttgtcgttattgtcgcgctcggcgatgataaacccgagctctccacgctgcgggcgtttattagcaatggacggcagggcgtcaattatcaccgtaatgtatggcatcacccgctgtttgcgtggcagacggttaccgattttctgacggtggatcgcggcggcagcgataactgtgatgttgaaagtatcccgacacatgaactctgttttgcgtgacgctattggccttcttgcataagatgaacatattgttcattgtttatgctcatattttgggccggagttaacgtaaatatgacggaagtaagacgacgcggcaggccaggacaggcagagccgactgcgcagaaaggcgctcaggcgctggagaggggcatagcgatattgcaatatctcgaaagaagcggcggcagttcatcagttagcgatatttccggcagcctggatttaccgctttctacgacgtttcgcctgttaaaggtactgcaagcggctgattttgtgtaccaggatagccagcttggctggtggcatattggtttaggcgtatttaatgtgggctctgcgtatattcataatcgcgatgtcctctcggtggccggaccctttatgcaccgacttatgctgctttctggcgagacggtcaacgtagcgattcgcaacggtaatgaagcggtgttaatcggtcaaaaggagtgcaaatcgatggtcagaatgtgcgcgcccttagggagtcgtctgccgttacatgcttccggcgccggaaaagcgctgctttacccgctcaccgaagaagagctggtggggatcgtcgtcaataccggtttgcggcggtttacgccgaccactctggtggatttacctatcctgcttaaaaatctggagcaggcgcgtgaacagggctacaccgtcgaccaggaagaacatgttgtcgggctgaattgtatcgcctccgctatctatgacgatgcgggcagcgtggtcgccgctatctcaatatcgggaccggcttcccggctgacggaagatcgctttatcagccagggtgaactggtacgggataccgcgaaagacatcagtacggcgcttgggctaaaaccccctgtagcctgagccgcatcccgctcgctggagcgggacttttttaaaatttttaaaagttggaaactttttccaataaaaagaggtagcaataaaatggcaaaaatgagagccgtggatgcggcaatgtatgtgctggaaaaagaaggtatcaccacagcattcggcgttcctggggctgcaatcaaccccttctattctgcaatgcgtaagcatggaggcattcgccatatactggcgcgtcatgtggaaggcgcttcgcatatggctgagggctacacacgtgcggcggcaggtaatattggggtctgcctgggcacttccggcccggcgggaaccgacatgatcaccgcgctctattccgcttctgccgactctatcccgattttatgcattactggtcaggcgccacgagcgcgtctgcacaaggaagatttccaggcagtcgatattgaagcgattgcaaaaccagtcagcaagatggcagtgacggttcgtgaggcggcgctggtgccgcgcgtattacagcaggcttttcatctgatgcgctcaggccgcccaggtcctgtgctggttgatttaccgtttgatgtccaggttgcggaaatcgaattcgatccggatatgtatgagccgctgccggtatataagccagccgccagccgcgtacagattgaaaaggcgctggagatgctgattcagtccgagcgtccggtaattgtcgcgggcggcggggttattaacgccgacgccgcgccactgctgcagcagtttgccgaactgaccaatgtaccggtgatccctaccctgatgggctggggctgtatcccggacgatcaccccctaatggcggggatggtcggcctgcaaacggcgcaccgctacggcaacgccactctgctggcatccgatatggtttttggcatcggtaaccgtttcgccaaccgtcatacggggtccgttgagaaatatactcaggggcgaaaaatcatccatatcgatattgaaccgacgcaaattggccgcgtgttgtgcccggatctgggcatcgtttcggacgccaaagcggcgctaacgttgctgatcgatgtcgcgcaggagatgcaaaaggcggggcgtttgccatgccggaagacctgggtggacgaatgccagcagcgtaaacggactttgctgcgtaaaacccactttgacaacgtgccagtgaagccgcagcgcgtctatgaagagatgaacaaagcctttggtcgcgatgtgtgctatgtcaccaccattggattatcgcaaatcgcggcagcgcagatgctgcatgtgtttaaagacagacactggatcaactgcggccaggcggggcctcttggctggacaatcccggcggcattaggggtttgtgctgccgatccgcaacgcaatgtggtggcgatttccggcgatttcgacttccagttcctgattgaagagttagccgtcggcgcgcagtttaacatcccgtatatccatgtgctggttaacaacgcttatcttggtctgattcgccagtcgcaacgcgcatttgacatggactactgcgtacagctcgcctttgaaaatatcaactccagcgaagtgaatggctatggcgttgaccatgtaaaagtggcagaagggttaggctgtaaagcaattcgtgtctttaaaccggaagatattgcgcctgcatttgaacaagctaaagcgctgatggcgcaatatcgcgttccggtggtggtggaagtcattctggaacgcgtaaccaatatttccatgggcagcgaactggataacgtaaccgagtttgaagaggttgcggatagtgcgaaagatgcgccaacagaaacctgttttatgaaatatgagtaagggaggtaatcgatgttacgtttctctgccaatctttctatgctgtttacggaatatgatttcctggaacgctttgataaagcggcgttgtcgggatttcgcggcgtggaattcatgtttccctacgataacgacatcgaagtgttaaaacgtaagctcagggataataatctggaacatacgttacataatttacctgctggcgactgggcggctggcgaacgtggaattgcctgtattcctgggcgcgaagaagagtttcgcgatggcgtagcggccgcaatccgctatgcacgtgcgttaggcaataagaaaataaattgtctggtgggtaaaacgccgtcaggattctccgcaacggagatccacgacacgttggtcgaaaacctgcgctatgcggcaaatatgctggcgaaagaagacattttattacttatcgaacctattaatcactttgatatgccgggattccatctcaccggcactcaacaggcgttagcattaattaaggatatcggcagtgataatatcaaaattcagtatgatatttatcacatgcaacgcatggaaggggaattaacgcaaaccatgacggcatgggccgataaaataggccatttacagattgctgataacccgcgtcgcggcgagccggggaccggggaaattaattatgactttatttttaatgtcattaaacagtctggttatgatggctgggttggctgtgaatataaaccactgactaccacggaagcgggattatcgtggattaatcagtaccgttaaaacgcagaataattcgggcagcgcttttttttccactgtgttggaaagggattgtgttgcctgaatctggaaacaccgaaagcaataaaagaggttgtatatgaaactgggatttattggcctgggaattatgggctcgccaatggctatcaatttggcacgcgccggtcatcaattacacgttacgactattggtccggtcgcggacgaactgctctcgctgggggcggtaaatgttgagactgcacgtcaggtaactgaatttgcagacattatcttcataatggtgccggatacgccgcaggttgaagaggtgttatttggcgaacacggttgcgccaaaacatcgcttcagggaaaaaccatcgtcgatatgagttctatttctcctatcgaaaccaaacgttttgcccagcgcgttaatgaaatgggcgctgattacctggatgccccggtttccgggggagaaatcggggcgcgtgaaggcactctgtcgattatggtcggcggcgagcagaaagtctttgaccgcgttaaaccgctctttgacatcctgggaaaaaatatcaccctggtgggcggcaatggggatgggcaaacctgtaaggtggctaaccaaattattgttgcgctgaatattgaagcggtttctgaagccttagtgtttgcttcaaaagcaggcgccgatccggtacgcgtgcgccaggcgttaatgggcgggttcgcctcttcacgcattctggaagttcacggcgagcggatgatcaaccggacgttcgagcctggtttcaaaatcgcgcttcatcagaaagaccttaatcttgcattgcaaagcgcaaaagcgctggcgctgaatttaccgaatacggcgacctgccaggaattattcaatacctgtgcggcaaatggcgggagccagcttgatcattcggcaatggtacaggcgctggaattaatggccaatcataaattgtcctaattatgtgtatcgctgcggctgcagcgatacctgttcacaaggaacactctgtaaaggtgaagaacatgagtgaaactaaaaaatccgggattgattactggaaacaaattgttgtcgtaatgagcctgggctgggtagcgatttggatctatcgcaccgtgcttacgccaatttatccagaaattcaggcatctttagacaatgtaagtaatgcagaaataggcgccattgcaagtttttacttttttgcttactgcagtatgcaaatcccttgcggaatattggtcgataaattcggtcaaaaaatcatgctgatggccggatttacgctttttattattggtacactctgtatcgcgaaagccaatggcctgaccatgatctatatagggtcgctaatggcaggtggcggatgcgcttctttctttagctcggcttattcactctcttcggcaaacgtgccgcaggcccgtcgggcattagccaacgcgattatcaacagcgggtcggctatagggatggggattggcttaatcggttccagcgtattagtaaaaaacatgagcatggcctggcaaaatgtactgtatatcgtggccgcgatattagtaatcatgctgtgcgtctttacgctgatcattcgcggtaaagccaaaagcgactctgcgcaagcggaaaagcaaacccaaaccgttacggaagatgagaaacgtgcgcctttattctctggtttattgtgtagcgtttacttcctctatttctgtacctgctacggttattatttgatagtgacctggctgccctcttatctacagactgaaagaggatttgatggcggagctatcgggctggcatcagcgctggtggcggtggttggcgtaccgggggcgttattttttagccatctgtcagataaattccgtaacagtaaagttaaggttattctcggtctggaaattgtggcggcagcaatgttggcgtttacggttttgtccccgaataccacgatgctgatggtcagcctgacgctatacggcttgctggggaaaatggcggtagactcgatcctgatctcctttgtatctgaacaggcttcggcaaaaagtctgggaagagctttcagcctttttaatttctttggcatgagctcggcggttgtcgccccaacgttgaccggatttatttcggatgtaacggggtcgaaggagatcagttttgtgatttcagcatgtttagtggtcaccggaacgctgatctttgctgtcgtcactttatataaaaagaaagcaacgcaacgtattgcttcagcttaaaaataattatatctactaattctttattttatatttatttgttcctcatagctaaacccataacaacgttatccgatgcgtgaaaagagggatttatggaacatcaaagagagctataccagcagcgcggttatagcgaagacttattacctaaaacagaaacccaacgaaactggaaggcatttaactatttcaccttatggatgggatctgtacataacgtgccaaattacgttatggtcggcggtttttttatactgggcctatcaacatttaatatcatgttggccattattatcagcgcattatttattgcggcggcgatggtaatgaatggcgcggcaggcagcaaatatggcgttccttttgctatgatattgcgaggttcttacggcgtccgcggcgcgctattccctggattattgcgagggggaatcgcggcaattatgtggttcggcttacagtgttacgcgggatcgctggcatttcttattttgattgggaagatctggccaggatttctgacattaggcggagatttcaagctgctgggtctttcactgccaggactaattacttttctaattttttggattattaacgttggcatcggttttggcggtggtaaagtattaaataaatttaccgctatcctcaatccatgtatttacattgtctttggcggcatggctatttgggcaatatcgctggtcggcattggcccgattctggactatctgccttcaggcgtgcaaaaagcagagcacagcggctttctgttcttggtggtgattaacgccgtagtcgccgtctgggcagcgccagcggtgagcgcgtccgatttcacgcaaaacgcgcattcatttcgcgctcaggcattgggacaaacgctggggcttatcgtagcgtatatattattcgccgtagccagcgtgtgcattattgccggagccagtattcattatggtatggatacctggaacgtgctggatattgtgcagcgctgggacagcctgtttgcttcattctttgcggtgttggtgattctgatgacgacaatttcaaccaacgccaccggtaatattatacctgcggggtatcaaattgcggcgcttgccccgacaaagcttaactataaaaatggcgtaatgattgccagtattatcagtctactgatttgtccatggaaattaatggagaatcaggacagtatttatctgttcctcgatattatcggcggtatgcttggcccggtaatcggcgtaatgttagctcattattttgtggtaatgcgtggaaaaattaatcttgatgagctgtacaccgccagcggtgattacaaatattatgataatggatttaacctgactgcattttcagtcaccctggtcgcagttattctgtcattaggcggcaagtttataccatttttggagcctttatcccgcgtgtcctggtttgtaggcgtaatagttgcgttcgttacttatgcgctattgaagaaacgcacgggttttgaaaatacaggagagaaaaaactcgcaggttaaatattgaaaaagcattaagcgtatttaatgaagtgtgcgctatttaaaaactatctgtatccatacaaggagtttgttatgtcttttgatttaattattaagaacggtactgtcatcttagaaaacgaagcgagagttatcgatatcgccgtccagggcggaaaaatcgccgcgattggcgagaacctgggggaagcgaaaaatgtgctggatgcgacgggattgatcgtttcgccgggcatggttgacgcgcatacccacatttctgaaccgggccgtacccactgggaaggctatgaaaccggtacccgcgcggcggcgaaaggcggtattaccacgatgattgagatgccgctcaatcagctgccggcgacggtcgatcgtgagacgattgaactcaagtttgacgcggcaaaaggtaaattgaccatcgacgccgcgcagttgggcggtttggtttcttataacctggatcggcttcatgagctggacgaagtgggcgttgtcggcttcaagtgctttgtcgccacctgcggcgatcgtggcatcgataatgattttcgcgacgttaatgactggcagttttacaaaggcgcgcaaaaattgggggaaatggaccagacggtactggtacattgcgaaaatgctctgatttgcgatgagctgggcgaggaagctaaacgcgaaggtcgcgtaacggcgcatgattatgtcgcctcacgtccggtatttactgaagtggaagccattcgtcgcgtgctgtatctggcgaaagcggcaggttgccgtctgcacgtttgccatatcagcagcccggagggggtagaggaagtaacgcgcgcgcgtcaggaaggccaggatgtcacctgtgaatcgtgcccgcactattttgtcctcgataccgatcagttcgaagagattggcaccctggcaaaatgttctccgccaattcgcgaccaggaaaaccagaaagggatgtgggaaaaactgtttaacggcgaaatcgactgcctggtatccgaccactctccatgccctccggaaatgaaagcaggcaatatcatgcaagcatggggcggaattgccggactgcaaaactgcatggacgtcatgtttgatgaagcggtgcaaaaacgcggtatgtcgttgccgatgtttggcaaattaatggcgaccaacgccgccgatatttttggtctgaaacataaaggacgtattgcccccggcaaagatgctgacctggtctttattcagcctgacagcagctatgttctgaaaaatgaagatctggaatatcgccataaagtcagtccgtatgttggccgtactattggcgcgcgtattaccaaaacgattttgcgcggcgatgttatttatgacatcgagcatggcttccctgtgccgccaaaaggtcagtttatccttaaacatcagcagtaatccggtgtgatttaatgcccgtcgtcacgacgggcattctctattttaaggtgtggatatgttccctgttattaaccgcgaaagtgtgttgtccggctttcagtggtttttctttattttctgtaacacggttgtggttccccctaccttgctgtccgcttttcatcttcccgctgataacttgttaatgctcacacaatacgcttttttgaccaccgcgttggcctgcctggttcaggcattttgcggccatcgccgtgccattatggaagggccgacaggactgtggtggggcgctattcttacgattacgcttggcgaggcgtctcgcggcacgccgctgaacgatatcgcctccagcctgtcggtcgggatcgcgatctccgcaatggtgacgatatttatcggcattagcggcttaggacaccgtctggctcgcctgtttacgccggcggtaatggtttttttcatgctgcttttgggcgcgcagctgacctcaatattttttaaaggcatgctggggctgccttttggcattgccgataccagcgccagaatcaaattggccccctttgggctggcggtcgcggtgatgtgttttatcctcgcgatgattattttcctgcagcagcgtatctcccgttacgcgttactggtagggaccgtggtcgggtgggggctatggcggttatgctttccttcatcacacttaccgccgggtgaattaagctggcgatggtttccgctgggcagccacggcacgctgatgccgggtattattgtgacggcggtgatgacggggttagtcaacatcagcaacacttacggcgccatccgcggtaccgatatcttttatctgcatcaagggtcgggcagttctcgttatcgccgaagctttatgatttccggactgatgacgttagtgacggtgcctttcgcggtcgtgcctttttcgccttttgtgtcttccattggtttattaacgcaaaccggcgacagttctcgcaaatcctttatctgtggtagcgcgctgtgtctgctggttgccattataacgccgttaacccgcttattttgcgctattccactggcgatcagcagcgccgttatgctggtctcttatttacctttactttattccggtttggtttttagccagcaaattacgtttaccgcgcggaatatttatcgcctggcgttaccgctttttgtcggcatttttttgatggggcttcctccggtctatttacaggatcttccactgatgattcgtcctctgcttagcaacggattactggtgggaatcttactggcagtgcttatggaaaatcttattccgtgggaacgcattaaataacgtgagaaaacaaggagacatgatgaagattgtaattgcgccagattcatttaaagagagcttaagcgctgataaatgctgtcaggctattaaagcgggattttcaaccgtatttcctgatgcgcgctatgtttgtttaccgatcgccgatggcggagaaggaaccgtggacgcaatggtggctgcgaccggcgggaaacgggtttctgtggacgttagcgggccgatgggggaaaaagtaaacggattttatggcctgaccggcgacggcaaaacggcgattattgaaatggcggcggcgagcggattgatgctggtggcgccagaggcgcgtaatccgctgctggcatccagtttcggcaccggcgaattgattcgtcacgccctggacgcggggattcgccatattattctgggtatcggcggcagcgccacggtggatggcggaatgggagtagcgcaggcgctcggtgtgcgttttctggacgcgcaaggaatgctgcttggcgccggagggggcaatttatcgcgcctggcgagcattgacctgcaggggtgcgatccgcgtatttcagagtgtcgtattgaggtcgcctgtgatgttgataacccgttggtggggccacgcggcgcggcggcggtattcggtccgcagaaaggggcgacgcctgaaatggtcgagacgctggaaaatggattacgtaattatgcccgtgttttacatgccctgaccggacgcgacatgtctcaaataccgggcggtggagcggccggaggaatggggattgctgctatcgtcttcctggaagcggaaatgaagcccggtattgagattgttatgcaggcggtgaagttggaggaggcggtaaaagaggcctcgctggtgattaccggagaagggcgaatcgactcgcaaacggcgggaggaaaagcgccgataggcgttgcgtcagtggcgaaacggcatcacgtcccggttatcggcattgccggcgtactgggcgacggcgtggaagtggtccatcgccacggtattgatgccgtattcagtattttgccgcggctggcgcctttgccggaggttctggcgaacggtgaacaaaatctctaccacagcgcctgtaatattgcccgcgtcatcaaacttggccaggatatcgggactcgttaagcataaaaaaagccacggttctcaccgtggcaaaatccaacatagctaaattaaaaataatcaggagggctgtccgccgttaaatcataacgtcgcggttacagtctttggagtagatgtagctgaatgcttcgccacgacctacaccgtatccggcctgcagggaataagcgcccatgaagatgtagtcgccttttttcaccggcacccagttgttgtcgaggttataaaccccctggccggaaaggatataagcgccatgttcctggacgtgggtttcaatatagccgtggctggcgcccggttcgaacgacagaatatgcatattcatatcgaagcccagctctttaggcaggaaatccagcagaataacatcttccatgccttcataatgaatacgctccagctggctggcattgccggaaaccaaccacggggcatgcccctcgacaggagtatagcggcgtttatataaaaatagctggctgtcttccgtttgagcgttgctaaaggtcatcatctcgcccggtggacaatagaggtatccgccctgagttaaagagaatgtttttccttctgctttagcttcaatatttcccgtaatgacatagagaaaagtttcaatcccctcgccgccaaagccctgctggttgccgccattctgatgtaaggtgaccagataatcgacgaaagaagcacccagcttcggcgtcgaaaggattgtgacgtcacagttttcaaagccaggaataatatttttcaccagaccgtccggcgttaagagcgcatagttaccgtgtttcacaatggcgcggttcgccagtaaatcatcgcggtaacccgtgacgttattcagatatcccattgatggctccttatttttgccaggcaagttgatgcagcattaatgccagagttttgaccccttcagcaaggtcattaatgttggtacgttccgccgggttatggctgataccattaatgctggggacgaaaatcatacaggtagggacgcgcggcgcgaaaatttgcgcgtcatgacctgcgccgctatgcattatgcgatagttcagttgttcggtttcacacagcctggtgagggccgcgaccagttcggcgttcatcggcaccggcgcttcgtccatccacaaatcgatatcgatgctgatatccatttcatcgcagatggcgcgcatatcgttttccaactgttcggtaaattcgcgaagtaccgcggcgtccgtatgccggcaatcgattgtaaatgtggtttttctagggactacattgaccgtattcggctgcggctcaactttgccgaacgttaataccaggggatcgccatgctgtttggctttttcaatggactgactgcaaatacgactgaaggcgtgcaccgtatcgcgacgatagcccattggcgttgtgcctgcatggttggactcgccgttgagcgtcaccgtgtagcgacgttgcccgacgatggcgttgacgacgccaatcgactgtccgttgctctccagaacgcagccttgctcaatatgcaattcaacaaaggcgcggatatcggttcgcgcagcgagtggcgcggcgggaagggtaaatccgcacgcctgcatagcgtcgacaaagcctgtgcctttggcgtcctggatatggcgtacctcttcaggattcgccaggccaaaaatgttcttgctgccccaaaaaacgtaagggaaacggctgccttcttcctctgccattgacactacctcgacggtgcgcagcggcgcgccgtaggtcgcttttagccagtcgatcgccagccaggcggcaagcgcgccgaattgcccgtccagattgccgccgttgacgaccgtatcaatatgcgaaccgcttaaaatcacctgctccggaaattgtgtgccgcaaaggcggccatataaatttccgacgtcatcaaagcgtgtctccagaccgctttctgccattcgctttttaaactgctgctgtgtttccagccactcaggcgaataaagtaaacgcgtcattccacccgtaggatcggctccaatggaagagagccagggcaatgtttcttctatcgcgtggcgaaaatgctttatcatagaaaattcctgtttcaataattattgggcaaagggattttttgtttcgtatgacttgagatagagggcatcggaaatcagatattgataaatatcatcaacaatatcgataccattcatatcggcatttttctgtttaatatcctgatcctgtccaggataataaacctgtttaaaaccgggagcgggcttcacggaattgagttcctgcatagtctgactaatatgtttgcggaataattcacaggaagaaaagaacgccggattaatgaccagatgaagttgtcctaaattgcgtccggcgtgtaaatcttcatacatcgaactgacctggcggccaaacggcagccccagcagaatgccggacaaaatatcgatcatcatcatcaggccgtaacctttcgggcctgcggcgggtaataacgcattgacggcaaaaggatcatgtgtcggcgcgccgtttttatcgacggcccaactctccggaatggactcattgcgagaccgtgcatcgaggacttttccccaggcctgcacggtggtggccatatcaaaggtaatgatgtcatcgccttcgcccggcgcggcaaaggccagcggattagtgccatagtaaatatccgccccgccaaacggcacgaccataggatcggactgacagatagacagaccaatcaggccttcgcgagcagcctggcggacgaaataagagatggcgccgctatggcccattctgctaatgccgacaaccgcgacgccattttttttggctatttcaatagcatgctccattcccattttggctgcgacctgtccggcagcattatcggcatgcagtatcgccgtacagggaccggtattctcaatgcggaacgtcggctcccggttggtgccgccttttgaaattcgttcggcataatattcaacgcgtacggcgccatgtgagtgaatacctctggcatctgcataaaccagtacgtcggcgacggtggcggcgtgctcacgttttagtccggctttataaagcttattttcgataagctgatggagtgtttcccgactgattttcatctgtcttcctttttaacgacggtgtgaagcatgactgcgattaacataccgggaaaataaaatgattatgtgatccagacaggcaaaaaaatataattagaatttatttgataatcaggcgggttttatctttttgcttaaataaaaagcttttttagaaaatcataactaatcctttagccgttgtttgaattcttttgttaataaatttgatgtgacgttaatcactctatttaccctcccggatatataccgtgaagcgcacattaacactgctcgtgcaattgcaatgggtgcaattattaaggagttgttatgatccacgcctttattaaaaaagggtgttttcaggactctgtcagcttaatgattatttctcgaaagctgagtgagtccgaaaatgttgatgatgtatcggtaatgatgggaacgcctgcgaataagtcgctgctggaaactaccggtttctggcatgacgattttcatggcgctacgcccaatgacatttgcgtggcgattcgtaccgaagcggtagatgacggcattacgcaggtgattgtgcaacagctcgaagaagcattgcagcagttggcgcagggaagcagcggcagccagtcgttaatccaggtcagacgctgggaaagcgcctgtcagaaactgccagaggcgaatctggcgctggtatcggtggccggcgaatatgcggcggaactggcagagcaggcgctggatcgttcgttgaacgtgatgatcttctccgataatgtcacgctggacgatgaaatcagactaaaacgccgggcgcgtgataaaggactgctggtcatggggccggattgcggcaccgctatgatcgccaatacgccgctggctttcgctaacgtcatgccagagggcaacatcggggtgattggcgcttccggcaccggtattcaggagctctgttcacagattgcgctggcgggggaagggattacccatgccatcgggcttggcggacgcgatttgagcgccgaggtcggcgggatcagcgcgctaacggcactggagatactcagcgcggatgaaaagagccaggtgctggcctttgtctccaaaccgcctgccgatgcggttcgtcagcatattatcgcggcgatgaaagccaccgggaaacccgttgtagcgctgttcttagggttttcctctcccgttgcgcgtgagggaaacgtctggtttgcctcgacgctggatgaagccgcccgcctggcatgtttattgtctcgcgtgacgtcgcagcgtaaagaaatggtttcaacaggcggcgtgattcgtggcctctataccggcggaacgctggcggcggaagcggcggggctgctggccggctatctgggcgtcgcggcggatacggaacatcaccatggcatgatgcttgacgctgacggccaccagattatcgatctgggcgatgacttttataccgttgggcgaccacatccgatgatcgacccggcgttacgtaatcagcttatcgccgggcttggcgcgcagccgcaggtacgcgtgttattagtggacgtcgttattggttttggcgcgaccgccgatcccgccgcatcgctgattcaggcctggcagaaggcatgcgccgcacgcgccagcgatcagccgctgttcgccatcgcaaccgtcaccggaacggaacgcgatcctcagtgccgctcgcaacaaatcgccgcgctcgaagatgccggcatcacggtagtggattctcttcccgaagccactctgttggccgcggaactgattcgacccactctctcttccactcatccatcagctccccggttactggaagcggtagcggtgattaatgccgggttacgtagcttcgcgctggatttacaggctgccggtatgcccgtggtgcactaccagtgggcgcctgtcgctggcggtaataaaaaactggctcgtctgttagaacgtttgcaataaggggttcccatgtttacatcagtggcgcaagccaacgctgcagtcatcgaacaaattcgtcgcgcacgtccgcactggctggatgtgaagccagcttcttcattaattagcgtgctcaatcaagggaaaacgcttcttcatgccggcccgccgatgcgctggcaagagatgaccggcccgatgaaaggcgcctgtatcggcgcatgcctgtttgaaggatgggccaaagatgaaatgagcgcgctcgcgctgttagagcagggaaaggtcaactttattccctgccatcacgttaacgccgtggggccgatgggcggtattacctcagccagtatgccgatgctggtcgtggaaaatatcaccgacggcaatcgcgcgtactgcaatctcaacgaagggatcggcaaagtgatgcgtttcggcgcctatggcgaggatgttcagcaacgtttgcgctggatgcgtgatgtgctgatgccggtattaagcgcggcgctgggacgtctggagcgggggctcgacctgaccgcaatgatggcgcagggcattacgatgggagatgaattccaccagcgcaatatcgcctcttccgcattgctgatgcgcacgttggcgccgcatatcgcccgtctggaacacgataagcagcagatagcggaagtgatggattttctgagcgtcaccgatcaattcttccttaatctggcgatggcctactgtaaagccgccatggacgcgggcgcgcagattcgcgccggcagtattgtgacggcgatgacccgtaatggcgatatgtttggcattcgggttagcggtctgggcgaccgttggttcaccgcgcctgttaatacgccgcaggggctattttttaccggtttttcgcaggatcaggccaacccggacatgggcgacagcgccattactgaaacgtttggtattggcggcgctgcgatgattgccgcgcctggcgtaacgcgttttgtcggtgccgggggaatggaagcggcgaaatctgtttctgaagagatggctgaaatttatctcgaacgcaacatgcagctacaaatccccggctgggattttcagggggcctgtctgggactggatatccgccgcgtggtcgagaccggaattacgccgctgattaacacgggtatcgcgcataaagaggcggggattggacagattggcgcgggaaccgtccgtgcgccgctggcctgtttcgagcaggcgctggaagcgctggcggaaagcatgggcgtaagttaagagagcgtctcatgaaacgtatccatcctcttatggcaagccgacaatcggcggattatcggcaaccctggcagatgtcaggggtatggcgtcgctctattaattttgtggcgaaaagcggtgagttattaacgcttcaccgtcgggggagcggcttcagtccgggagggtggatactgcgcggcggcgattttgacgccttgcgcgatgtgctcaccgatggcgaaaaaccgcagtcaaccgctgccggtattcagattggcgagtttcttttatgcgagccggagaggcgctgttcgctgcgggttccgcgctatcttgcgtcgccgcgtcttaacgcgacgtacatgcagcgtagtgaggagacgggactgtttgggccgttaaccgtcgccgcagcccagcctctatgtccggaacttcgccagttttgtcactgctttcagtcggcgcttgcaggtgctgcgactgactggcggctatggctgggtaaagggccgggcttaacgcccagtcatgacgacacgctgacgggaatgttgctggcggcctggtattttggcgccatagatgaacgcgtcgggcgtaatttttttgcccaatccggcagccttgatcgggcgacgacgctcgtgagcgtcagctatttacgctatgcggctatgggttatttcgcgtcgcctttactccactttattcatgcgctgcgacgagatgctcgcacagaaacggcgattgacggactgctggcgctggggcacacctctggcgcggatacgctgctggggttctggcttggacaacaaatagtaaaaggatagggaatgaaaacgttggtagttgctcttggcggcaacgcattattgcagcgcggagaagcgctaacggcagagaatcaatatcgcaatattgctgacgcggtgcccgcgctggcgcgacttgcccgctcgtatcggctggcgatagtacatggcaacggccctcaggtcggcctgttggctttacagaaccttgcctggaaagccgttgagccttatccgctggatgtgctggtagcggaaagtcagggcatgatcggctatatgctggcgcagcgtctggcgcttgaacccgatatgccgccggtgactacggtattaacgcggataaaggtatcggcggacgatcctgcttttcttgaaccggaaaagtttatcggtcccgtttattcgccagaagagcaaatggcgctggaagcgacttatggctggcatatgaaacgtgatggaaaatatctgcgccgtgtcgtcgcttccccggcgccgcgtcagattatcgaaagcgccgctattgagttattgctaaaagagggccatgtggtgatttgcagcggcggtggcggggtacctgttgccggcgaaggcgaaggggtcgaggcggtgatagataaagacctggcggcggcattgctggcggagcagatagcggccgatggtctgatcattttgacggatgcggatgcggtgtatgaacattggggaacgccgcagcagcgcgctattcgtcaggcttcgcccgatgagctggcgccgtttgccaaagccgatggcgcgatggggccgaaggtgaccgcggtaagcgggtatgtgaagcggtgcggaaagccggcatggattggcgcattatcgcgtattgacgataccctggcgggcagggcgggaacctgcatccgtctgtgatcgcgacgggcggcgacagagaatgcgccgcccacgctgtttatttaagcttactttgcgcccagataatgccgctggcgtattcgcccggcaggagcggagagagcgcttccagggtggcgctaagacgtgacgtatcgctgtcggtcagattcagatggccgacttttcgccccggacgtaccgctttatcataccagtgcagatgtaccagcggcagcttcagccagtcgtaattcagctcgctgccgatcagattgatcatcaccgacggggcgttaatcaccggcgcgggcaacggcaggccggtaatcgcgcgcaaatgcaattcaaactgactgatgctggcgccattttgcgtccagtgtccgctgttatgcacgcgcggcgccagttcattgattaacaggccttccggcgtgataaaacattccatcgccattacgccgacgtagttcaacgcctgcataattgctgacagcatcgattccgcctgctcctgctgttcggcgttcgcctgtgggaacgcgacgctggtccgcaagatgccgtcctgatgcaaattgtgcgttagcgggtaaaacacggtactgccgtcatgagcgcgcgcgccgactaacgacacttcgccggaaaaatggataccgcgctcaacaatacattcgccatagcagtcatccggcagttgcccggtttcgtccgcgcgtagacgccactgcccgcgaccgtcgtagccgccaacgcgacgcttaataatcgccagttcgcccagacggtcaaagatgccggaccactcgtcggtgctggtcagcagctgccacggcgcggtcgcgagtcccagtttatcgaaaagctgtttttgtgtcagacggtcggcgatgatcggaaatacatcgcgattgacgaaggccgggtggcgcgccagctcgcgggtaagcgcggtttccggccagcgctcaatctctgcggtaatgacgctctgctgtaccggcacggcggtaggctctgcatccagaccaaccggccagacggcgatacccagcggttcgcccgcctggcgcagcattcggcccagttgtccgttgccgagaacgcaaacttgcttcatagcgtcccccgcggatcgggattttccagtacttcatcggtttgcgctttgcgccagtcggcaatgcgctgatgcagttccgcgtcgtgttgcgccagaatctgcgcggcgagcagggcggcgttagcggcaccggctttaccgatcgccagcgtacccaccggaatgccgcgcggcatctgcacaatggagtagaggctatccacgccgcttagcgcagcgctttgtaccggcacgccgagtaccgggaccagcgtttttgccgcaatcattcccggcaggtgcgccgcgccgcccgcgccggcaataatcacttgatatccgttctcttccgccgtttcggcgaagctgaacagtttatcgggggtgcgatgggcggaaaccacttctacatggtgcgggacatccagaatttcaaaaatttcggcggcgaattgcatggtagcccagtcgcttttggaccccatcacgatggcgacacgcgccggattattgcgggaagacatgcgtcttaaaactcctgtggtgcgggacacgctgcttttgaggtgtcagagaatagcatgataatcaggcaaggaaaacggttgcgtgcgcgccgtaacggacgattcgacgaacatttacagagggaaggcgattaactcaacgttgtccggcgtgacttttaccattgaaccttcatgatgccatgcgcctaacaccacgcggaacgcgggctggtcgttggcggaaagttcatgcaccgccgggcggtgggtgtgaccgtgaatcagccactgtacgcggtgtttttccatttcggcgacgacggtctgcgcattgacgtccataatatccagcgatttgctgctgttggcggctttactgccggcgcgcattctggcggcgatacggcggcggataaacagcggcagggtaaggaacagccgttgaacccacggattatggactttggcgcgaaacgcctgatatccggcatcatcggtacagagcgtatcgccgtgcataatcaacacattgcggccatacaggtcgagcactttttcctgcggcagtagcgtcatgccgctttcgcgggcaaagcgtttgccaatcaggaagtcgcgattaccatgaataaagaagcaggggacgccggaatcaaccagcgatttaatggcaacggccatttcacgatgtagcgggttggggtcgtcgtcgccaatccaggcctcgaagagatcgccaagaatatacagcgcgtcggcctggcgggcttctacggctaaaaaacgcagaaaaccggcgacgatcgccggttcttccgtttgcagatgcaagtctgcaataaacagtgtcgccacgattactcgctgacggtcacgttttcaatgatgacgtcttcttttggtacgtcctggtgcataccgctacggccagtggcgacgcctttgattttatctaccacgtccataccttctacaacttccgcaaagacgcagtagccccagccctgcagactttcgccggagaagttcaggaagtcgttgtctgccacgttgatgaagaattgcgcggtagccgaatgtggcgcctgagtacgtgccattgccaacgtaccacgggtatttttcagaccattgttggcttcgtttttgatcgcctctttggtggctttctgtttcatgcccggctcaaagccgccgccctgaatcataaaaccgttaatcacacggtggaaaatggtgttgttgtaaaaaccttcgcggcagtagtccaggaagtttttaactgtttcaggcgctttatcatcaaaggttttgattacgatatcgccgtgattagtgtggaaagtaaccatttttgcatcctgttccaagagagtggtgctttagcccgcaatggggcacatataggggcttgttatagcataaccgtaagctgcgatcaccttgcaaagtgtgctgcttcgattacgaataatatgtatcatacagagattattacccacacacgtctatacggaatcttcgatgttaaaaatttttaatacactgacgcgccaaaaagaggaattcaaacccattcatgccggggaagtcggcatgtacgtgtgtggtatcaccgtttacgatctctgccacattggccacggacgcacgtttgtcgcttttgacgttgtcgcgcgctatttgcgttttctcggttataagctgaagtatgtgcgtaacattaccgatatcgacgataaaattattaaacgcgccaatgaaaacggcgaaagttttgtcgcgctggtcgacagaatgattgcggaaatgcatcaggacttcgacgcgctgaatattctgcgtccggacagcgagccgcgtgcgacgcaccatattcaggaaattatcgagctcacccgcaccttaatcgagaaaggacacgcctatgtggcggataacggcgatgtgatgttcgatgtaccgaccgatccgacttatgggcagctttcccgtcaggatcttgagcagcttcaggcgggcgcgcgcgtagatgtcgttgacgtgaagcgtaacccgatggacttcgtgctgtggaaaatgtcgaaagagggcgagccgagctggccgtcgccgtggggcgaagggcgtccgggctggcacattgaatgttcggcgatgaactgcaagcagttgggcaaccattttgatattcacggcggcggttccgatctgatgttcccgcaccatgaaaacgagattgcccagtctacctgcgcgcatgacggcgaatacgtcaactactggatgcactccggtatggtgatggtggatcgcgagaagatgtccaaatcgctgggcaacttctttaccgtgcgcgacgtgctgaaatactacgatgcggaaaccgtgcgctacttcctgatgtccgggcattaccgtagccaactgaactacagcgaagagaacctcaagcaggcgcgcgcttcgctggagcggctatacaccgcattgcgtggaacggataaatcagcggccccggcgggcggcgaggcgtttgaagcgcgtttcgtggaggcgatgaatgacgatttcaatacgccggaagcctactccgtcctgtttgacatggcgcgtgaagtcaaccgtctgaagggcgaggatatgaccgccgcgaatgcgatggcgtctcatctgcggaagatttccggcgtgctgggactgctggagcaggagccggatgttttcctgcaaagcggcgcgcaggcggatgacggtgaagttgcggaaattgaagccttgattcaacagcgtctggatgcccgtaaagcgaaagactgggcggcggcggacgcggcgcgcgatcgtctcgctgaaatgggtattattctggaagatggcccgcagggcaccacctggcggcgtaagtaagcgcttttacaggccgctctatttgcatagaacggcctgttttttattttttcgcaccgggcgaaagataaacacacaccgactcccccagattctgatgttcacacccgggcattgcccggctgtaatgggcaataaagcggatgacgctgtcgccgctgtttagccccacatttccttttcgcagcaattctgctggctgatcgtcggtgaaaacgttaggggtgaacagttttgcgcctaatcgttcaaaagtgccagcactaacgatagagggttgataaccctgaagctgcaaccagcggcgggcatcattacgtgaccaaatctgcgcatcgtttgctcgcgcaaacacttcgagaagccagccattcgaattctgataagggccggaaaaaggccacgcaatcaggttatagcggggactgtggaagagattgagtttgatagcgctatgtaagagcgtttgtaatgccgtcgcgatatctgaacgcgggcgcaaaacggcaatgctctgattcaccaggtcatcagccagaaactcatacagaccttgtatatagagcgctgattcagcggttccgcaagtattcagattatggtaaacccgccagtctccgtttggctggcgcatggcatagccagcatgtgaccaggttaaatgtcggctcgacatatcttgcccctggcgaaccagaatgacgaccggatcggattgactgttaagctgttgtttgagctgtagcgcctgatccattgtcgctgcgatgctctccggcgtgtttgctttttggtgacagttagcactgtctgcataagcgttgagcgagattgcgctgagccacagggcaaacgcgaaccgcttcatttggccggtaccgtctggttgctggaaagtcctgcgtcgtcctgatttaccatatgggcaaggaccttgccctcttttttcaaataagcgccggtgccttcctgcgttttttccagagtgactttatcacctgctttgaggttgccttctttgacgacatttagaggaacttgcattttaatgtctttgttatcgggggacttagtggttaacagcgcggttttttgctttttattttcgacaacagatccaatgctcaggttgagcggcagcagtacgggggagagtataattccgctaaccagtgcggaactgcccacgctgacaaccgcagacgatgccgcataccagccagtggcagacatttcttcgctatagctggcgtgggaaaatgagaaacagatgaccgcggcggcgaatgtcattttattcatattgattccttttaatatgcgttttaagtacccatagaaataacactaaaatacttcccggcaaccacacccacagcaattctgagagaatgacctggtgtccatacggcgtgatgtagcttgaaagcgcaaacggcgcgactttaatcacctgccagggcgcaaagaaacgttcatccgaccacggccacagccagccgacgcctttcccacccgtggttatcgaatccagcaggctgtgcgacagcaatgaaacggttaaaaacagccagcagcgcacctgccccgctcgaaaccatcgtcgtcccgcgagtacgcacaacagggggaggacgaatgcgaaaagtaaagaatgggtaaatccacgatggccgaacacgttgccgtaggcgacgccaaatttaaaggccagcacgtcggcatcggggagcatcgccagcacaacaccggcaaacagcaggcgaggagggataactttcaggcctaagcctgcgccaagacacagaggaacggcggcgtgggtgataacggtaggcatagcgatggttcacagggaaatagccatgctagcagttggaacgcagaggattaagtggatgattatctgaaaagacagcgtaatcaggccggataagacgctttgcgtcgctatccggcacttgtatcaggccacgacgttcacactttggccttcaaagctaacggtttgcccggcgacaattttgcagcgtttacgcgtttcaaccacgccatcaaccttcaccaacccgtcggcaatggcgattttcgcctgcgcgccgctttcgctccagccttccagcttgagcagatcgcacagctcgacgtgcgggtgcttgcctaaagagaatgtcgccatgttattttccttgtggatcgtgatattcaatgcacgcctgcagcgtgttttcgataagcgtggcgaccgtcatcgggccgacgccgcccggtactggcgtgatgtatgacgcgcgcgccgcggcttcgtcaaacacgacgtcgccaacgatcttgccattttccagacggttaataccgacatcaatcacaattgcgccttctttaatccattcgccgggaataaagcccggtttacctacggcgacaatgagcaaatcagcatgctcgacatggtgacgcagatctttggtaaagcggtgcgtaacggtagtcgtacagccagccagcagcagctccatgctcatcgggcgtccaacgatattggacgcgccaatgaccaccgcattcaggccgtaggtatcaatattgtaacgctcaagcagcgtcacaataccgcggggcgtacagggacgcaggcgtggcgcacgctgacacagacgaccgacattataaggatggaaaccgtctacgtctttatctggcgcgatacgctccagcactttaacgttgtcgatacctgccggtaaaggcaactgcaccagaataccgtcaatcgtgttatctgcattcagagtatcgataagcgccagcagttcggcttcgctggtggtttctggcaggtcataggagcgggagacgaaccccacttcgtcgcacgctttacgtttgcttgcgacataaatctgtgaggccggattgctgccgaccaacaccacagccaggccgggagcgcgaagtcctgctgcgacgcgtgcctgaactttttgagcaacctcagatcgcacctgctgcgcaatcgttttaccgtcaataatctttgctgccatcagagagaagattccatctgttacttcaagtcaaaggggatgacgctattttgtcagaagcgggcctcgctgtcagttaacgtttgtgtttccgatgcaaacgcgacgtctcccccgttcgttgccgatgctgagacgtgacccataagcgcgccatgattaaccaaaaagaaacaattcatcaccctggctatggttaccgtaatccctcgtcgttaatagcatcgggcggcataatgcgacattttatacaaaataagattagacccttcttatatcccaataagaattagcttaggtcattaaaagagtttgcggctattttttatttagcgaaatgtttaatttattaccgtgacgaaatgtcatattcgcaaagattaattactgcgtctgatactcaggggagaaacagaaaactaattaatctgcgatatctatctttacaggatgcagagataacttttctgacatgctatgtcgataataattcaaacggagccgacaggatgccgaaaccgggtgtgtgtaattcaagggaaatccatgaaacataaattaatgacctctactattgcgagtctgatgtttgtcgctggcgcagcggttgcggctgatcctactccggtgagcgtgagtggcggtactattcatttcgaaggtaaactggttaatgcagcctgtgccgttagcactaaatccgccgatcaaacggtgacgctgggtcaataccgtaccgccagctttacggcgattggtaatacgactgcgcaggtgcctttctccatcgtcctgaatgactgcgatccgaaagtggcggccaccgctgccgtggctttctctggtcaggcagataacaccaaccctaatttgctggctgtctcctctgcggacaatagcaccaccgcaaccggcgtcgggattgagattcttgataatacctcttcaccgttgaagccggacggcgcgaccttctcggcgaagcaggcgctggttgaaggcaccaatacgctgcgttttaccgcacgctataaggcaaccgccaccgccacgacgccaggccaggctaatgccgacgccacctttatcatgaaatacgaataatcccgtcagggaacgccagggaagggaggcgcctcaacggaagaggctatcggggataaaagagaacatagcaatgataaggaaaggcgcggcgctagtggggcttgttttgatgtcgcccgttattgcgcagccggtaatggtagagagcgggcgtgttcacctgcgcggacaactggtcaatggcggctgcgctgtcgccacagaaagccaggatttgcgcgtactgatgggacagtaccgcacgaatgcgtttaccggtcctggcagcttcgctcccgtcagcgttccattttcgttacggttaatctcctgtagcgcggaggtctggcgtcatgtcggcattgcgtttgctggcgttacgcctgcggaagatccccatgtttttctggccagcggcgaaggtatcggtaatgccggaatcggcctggcgttatttgatgaccagcagcggcaaatcatacctaacacgttaccgcttcattacacgcccattttaacgtcagaaatgactttgcattttaccgcccgctatcgggcaatttcagaaaatatgacgccgggacgaattcattcagaagtgtggtttacgctggtttacccatgaattttcttgccgacgtgactcaatgcaaaaggtattttttaccatgctgaatagtataaaattaggctttattgttcttctcacgttatttacttcgctgaacgtacaggcggcgggggggattgcattaggcgccacgcgagttatttatccctcggcggcgaagcagacttctctggcaatcagtaatagcgatactcaagaacgttacctcgtcaattcatggatcgaaaatagcgccgggcagaaagaaaaaacgtttatcgttacgccgcctttattcgtcagcgagcccaaaagcgaaaacacgctgcgtattatctacgccgggcaaccgctacccggggatcgggagtcgttattctggatgaacgtgaaagccatcccgtcggtcgataaaagtcatattgaaggaaaaaacgttctgcaactggcgattctgtcgcgcatcaaactgttcgtgcgtccggcgaatttgccgcagacgccggaagacgcgccgaccttgctgaaattttcccgtgtcggcaaccatctcaagataaccaacccatctgcttattacctcacgctggtcaatatcagcgtgggcgcgaaaaagattgataacgtgatgatcgcgccaaaaagcgacatgcaaattcccttaccgactggcgcgcagggcagcgtgacatttcagaccgtcaatgattacggcgcattgacgtcggcgacaacggccagtctcggttaagcagagagcgtgaagccacacgagaacacgatgaagaagacaacctggtttgcagggcgatttcccggctatgtatcaccgttaagcggcgtggcgctgtcggtgctggcggcgctgtgtccgctgacgagccgcggcgaaagttatttcaaccctgcgtttttgtcggcggataccgcgtccgtggcggatttatctcgctttgaaaaaggtaatcatcagccgcctggtatttaccgggtggatatctggcgtaacgacgaattcgtagcgacgcaggatattcgttttgaggcgggcgccgtgggcgccggcgataaatccggcggcctgatgccttgttttacaccggagtggattaaacggctgggcgtgaataccgcggtgttccctgtctcagataaaggcgtcgataccacgtgtattcaccttcctgagaaaatcccgggcgcggaggtcgcgttcgatttcgcgtcgatgcgcttaaacattagcttgccgcaggcgtcattgctcaacagcgcgcgtggctatatcccgccggaagagtgggatgaagggatacccgccgcactcattaattacagttttaccggtagccgcggaacagacagcgatagctattttttgagtctgctgagcgggttgaactatggcccctggcggctgcgtaataacggagcctggagctattcgaaaggggacggctatcattcgcaacgctggaacaacattggcacctgggtacagcgcgccatcattccgctaaaaagcgaactggtcatgggggacagcaataccgggaacgatgttttcgacagcgtcggctttcgcggagcgcggctgtactcttctgacaatatgtatcccgatagcctgcagggctacgcccccacggtcagagggatcgcccggacggcggcaaagctgacgatacgacagaacgggtatgttatctaccaaagctatgtgtcgccgggcgcgtttgcgattaccgatcttaatcctacctcttccagcggcgaccttgaggtgacggtagatgaaaaagacggtagccaacaacgttacacggtgccttactctaccgttccgctattgcagcgtgagggtagggtgaagtatgacctggtggccggggattttcgcagcggcaatagtcagcagtcttcgccattctttttccagggaacggtgattgccggcctgcctgcggggctgacggcttacggcggtacgcaacttgccgatcgttaccgtgccgtggtggtcggggcggggcgaaatttgggcgactggggagccgtgtcggtcgatgtcacacatgcgcgtagccaactggcagatgacagcacccatcaggggcaatcgttgcgttttctgtacgccaaatcgctgaataattacgggactaattttcaattgctgggttaccgctattccacgcgcggattttacaccctggatgatgtggcataccgcagtatggaagggtacgactacgaatacgatagcgacggacgccgccataaagtgccggtggcgcagagctaccacaatctccgctacagcaaaaaaggccgctttcaggtcaatatttcgcaaaacctgggggattacgggtcactgtatctttccggcagtcaacaaaattactggaatacggcggataccaatacctggtatcaactgggatacgccagtggatggcaaggcataagttattcgctgtcatggtcgtggaacgagtcggtggggatctcaggcgccgatcgcattctggcattcaatatgtccgttccgtttagcgttctgaccggacggcgctatgcgcgcgacactattcttgatcgtacttatgccacgtttaacgccaaccgcaaccgcgacggcgacaatagctggcagaccggcgtgggcggcacgcttctggaaggacgtaatctgagctacagcgtgacgcaagggcgtagcagtagcaatggttatagcggcagcgccagcgctagctggcaggcgacgtatggcacgctgggcgtgggatataactacgatcgcgatcagcatgactataactggcaactttccggcggcgtggtcggtcatgcggatggtattacgtttagccaaccgttgggcgataccaatgtcttgattaaagcgccgggagcgaaaggcgtgcgcatcgaaaaccagaccggcgtgaaaacggactggcggggttatgcggtaatgccctacgccacggtatatcgctataaccgcgtcgcgttagataccaacacgatggacaaccataccgatgtcgaaaataacgtcagcagcgtagtgccgacagagggcgctctggtgcgggccgcttttgatacgcggataggcgtaagggcaatcattaccgcgaggcttggcggacgtccgttaccgtttggcgcgatagtacgagaaaccgccagcggtattaccagtatggtcggcgatgacgggcaaatttatctgagcggcttgccgctaaaaggtgaactgttcatccagtggggagaggggaaaaacgcgcgttgtatcgccccttacgccctggcggaggatagcctgaagcaggcgattacgatagccagcgcgacctgtatccgtccgtcgtcataaaaggaaaaatagagatgaaaatatactcagcgctattgctggcggggaccgcgctctttttcacccatcccgcgctggcgacggtttgccgtaattcaaacgggacggcgaccgatatcttttacgacctgtcagatgttttcaccagtggcaataatcagccgggacaggtggttacgctgccggaaaaatctggttgggtcggcgtaaacgcgacgtgcccggcggggacaacggtaaattatacctaccgaagctatgtatcagaattaccggtacaaagcaccgaaggaaattttaaatacctcaagctgaatgactaccttctgggcgcgatgagcatcaccgatagtgtcgctggcgtattttatccgccccgtaactatattcgcatgggcgtcgactctaacgtgtcgcagcaaatgccgtttggcgtgcaggactcaaagctggtttttaaattaaaagtgatacggccttttattaatatggtgacgatccctcgccagacaatgtttactgtctatgtgacgacctctaccggcgacgcgttgagcacgccggtatataccattagctacagcggcaaagtggaagtgccgcaaaactgcgaagtgaatgccggacaggtcgtggagtttgatttcggcgatatcggcgcgtcgttatttagtcaggcgggggcgggtaatcgtccgcaaggcgtcacgccgcaaacgaaaactatcgctattaaatgtaccaacgtcgcggcgcaggcctatttatctatgcggcttgaagccgaaaaggcctcagggcaggcgatggtgtccgataatccggatttaggctttgtggttgctaatagcaacggtacgccgctcacacccaataatttgtcgagtaaaattccgtttcatcttgatgataacgccgccgctcgcgtaggtattcgcgcctggccgatcagcgtgacggggaataaaccggcggaagggccgtttactgcgcgcggctatctacgagtcgattatgattaaggaggcataatgatctttcggcgcgttttcatcgctatcggttgtgttttgttcagcccgctgagtcaggccaactcatctctgggcgaagtgaatattgaactgcgcggtaacgtggtggattttacctgcgccgtggtggcgggcgacagtaacaaatcggttaacctcggcacctggccgacaaaacagcttcacgccgccggtgacgccacgcaaccggtagcctttagcctaaaacttgaaggctgcccgccggggtcggcgtctataacgttttccgggacgccagcgcccggcacggcattactggcgcttgctgatacggcaatggcgcaaaaactggcgattgaaattcgcgatggcgatcaacgtcgattgccacttgaacaggccagcaaggccgtcgatattgacaacaacggcaatgctaccctgaaattctatgcgaactatatcgccttagccgatggcgtgcagcccggacttgctaacgcggatgcgaccttcctgatcaattacaattagtgtccgttattgtggctcccgaacgataattcgccgggagtacatttacaataattcgtgtgatttggcgtaatcgataagctcaacgatagagtgaaggccaagtttagaaaatatattggccttatgcgcgctgatagtcttgttactcaataaaagttgctcggcaatttctttgttagacattccattggccagatagcgcagcacggtaacttcgcggttagatagtggcatatcatggtgcccgcctttgggggtacgggtattactgatgaaattaagcgtctcagatgggaaaaaagaatagccggataaaatcatttttaccgcattataaatatcattgaggtctttgcgtttacttacaaatccgtttgcgcccgctcttattgctcttccggcataaaaagcctctgatttcgacgataaaaaaagtatccgggtatgttcctggatagatttgattcgtttaagtaaggtaaagccgtcggtgcccggtaattcaatatccagaatgacaaggtcaacaggataagtgcgcagatactctatcgctgttcggctatcatccgttttcaggacaacctgaatattgctatttttaccgagtaaaacttcgatcgacattcttacaatagggtgttcgtccataatgataacagatgcaggtttcattgttgtatgcctcagactgttatgcgtccttcgttttagaataagcgtcagacaccttaaagattgtgaaatagccagatctacacaccacacagtggagcaataataaagaatgagacctccctgttgactggctattttgcgtaagagtaataaatatgtggaatatccatttcgcaccaacaaaaaagaaatttctgattaagtaaaaacaatatggattatacctggtctgatttctcggaaaagtcttgcgaaatgcgaattatggatagcgggtaggatgttctgtggcgttatagaaaatttgttcgtggtggagctattttctttagagttgacattgagtagtttaaactgttgtttttaagtataaaaataatatgaaagactaattgtttagtatttgttatgtaataacagaaagatgttgacgctggagacctcaaaaaacgaggagggacagggggcgatgtaagaaaaaaatttttatcgcttaccaggacgagttgtaaatattaattttatgtgaaatatttacatttaatggaagtgaaaataagtaatttcttaaaaaatcttattcaccaaaacgttagttcgttaaaaaatgtcgtggaaagtaacgtttaactgctggatcagccgaagaaagctttgtctgtggggaaggttaaggagggtgataagttgtttaagccggtaaactacacgatgataaggtacgctttgctgacgtgctatttcttttaaagaggcaccttgcgctaaagtttcaatcatcaaccagtcagtacggctaaagctttccgataagcgaggtttggcggctgataacaaggcttcgcgtacagaggccagattttgtcgtcgcgacagaacaaaaaaacgcccagccatacggataaactgtgttatagcgggggttttatctgataccagcaggtaaatctggatatcgctttgttgccaactgagcgcgcgtagctggttaagcgcctcaatacaggagacaggtagcgcctccatatctacaatcagttgtctgagcgaccccttttcaatccacaaagaaatgtcatctaatgagcggaatgcagcggtaggttttccggaaaataagtagtgactcaatgaatagccgaggtagttatcagttgtaattattgcctgggaaatgataccaaccggcaaggcataattaagctgttggtccagtaactcaaggcgatcaaatatctgcggcgttggagagtgataacggcaggcgcagtctttggcatttcttaaacggcggtgtctttccctgcgtggtacgctgcgcatcctgctttttccattgctctaatatatatctggtaatatggctggccataaataaccttgtcccatcgttgcaccagcgtaaaaagcaatgcttcgttgctctgatgtttcaatgccttccatcagcattaactgctgaaaaaaaacttcgctatcatgttttgacggaagttgcgtcaggacctcatagccgattaattgcgcagttgagagattaacgattggctcagattttaacaatccgctgttgagatatgaatggcgtgttggcgaagacgccaggtgtgggggatttatcctttcctttaataaagtaccctgtgccaccaaacactcctccaggcatttatgatgcagccatatatttttgacccctgaatctatcaggatattatgggcatcattgtggcagcgttaaaaaaatgcctgtaggtatcgttacttaattattggtgagatatttcgtaagccttgtaaaaagttaagtgagtttacttactgagtaagaaatgaaggttaactctaatatactttaaaaactgctgctccgttttaacatgtaatttgcgcataatgctccggcggagtgactttgtctgctcttcagaaagtgaaagtaaagcacccgtttcgcttaaatgataaccgctggcgatcagttttaacaggtgacgttctgttactgaaaaatgacgagtcgtgcagtagtggcaaatgccagaagggacgctatgtcgaagcgctcgcttatgtaagatcaatatcattttccgggtaatttcttcaacatcatctttccgataaatatgcggcagcatatacagacatggtctgaacatgagcttttctttatcgcatttattacaaataatcacccgtagctgatgttgggtatgcataggtatctggtaacagcctgcgctgaaccaatcatcatccagggccaggaaagcgatatcggcattatctatctcttctggcggcagaaagtcaattttctgctgccattgattcgccagacgcgtcatgatgattttcaaaccatgctcaaagtgactgttttgttccttaatagcgatacgcagcataaaaaatatcctacacggcaggtgaatcatggtgaaatattaaagaaactgattgattttctaaatactggcggccttaattcccactttatgcgtgctgagatgtgtccaggcgatttcctggaacctggcattgcgccagaaaagacgatattcgtacacttagtcagcaaccagaacaaaagccattgactcaggagtgcctgaccgtataattctcgcgtttcgtctacacgaagtcttcacttcacaaggcgcccttagctcagttggatagagcaacggccttctaagccgtgggtcgcaggttcgaatcctgcagggcgcgccacttatatatcaactggttacgcctctttaattctcatatgggacatcatcaccaaaaatgtcgtctattttcctcgcgtgttccgttaaatgattaggcgcaaggtgagcatatctgtgaatcaccacggataacctggacacttctgagtcgttgatgatataggttttcatattcagccggtggcatctgctcgctcgaaccatgccggcgtctactgttataaaacatttctatgtaatcaaaaatatcgcttctggcttcgtctctcgttccgtagatcttttcctttatccgttcacgcttcagtagctggaaaaagctttctgcaaccgcattgtcatgacagttgccacgacggctcattctgctctccagtccgtgcgatttcaggatcgactgccattcatagcgggtgattacgtcgccacacggccatcagaagcgcattcaggactctatcttttgtcattcatggttgcagtgaccaattgaatctattgcggctttttttaatatgtcccgttcgtcagtaacccgcttcaactctttcgggagtcggcggatttcggtctgatcatctgactgctctttatttctttattggtggaggagttcgacccgtacttctttatcctggcgtaaagactgtgggtagtaatatcgagatgtgttgcgacgctggaaacagaatggccacgctcaacaacctgtcttaccgcttcaattttaaactcttcgggataacgtttaccgctcataggcacctctctttaagtcatcttaaatggctctgaggtgtctgttaaatccgtggcgattcacattgaccgcagattgtcaggttcctttacccggtagtgaaaccagtagggggcagtttatccgcactaaaagacggtgttcctgcatctgtggtggagttgaaccggatgggctttgggcacatgcgtatccttgcgtgtattggtcagttgccggagtctggattaatgcactatggctccgttgggttcttttttgggactgatggtgcattgcgacttcttgctaagaaacctgatggggcatttgtgacatacgatatgtaggaatccccgccgcccgttacccattggtggcggggaacattaattatacatgaatgttatttaattatttccgtaatattctcatttgtcctcgcccctgttctaacgtcccatgtcccagatgtaattgattctaattcatttgaatctatgtcgttaatcgcccgcccggaaagccatcttccgtctatttggaatgtcttcttgtcgacatctgcatttataatttttccatcctttgttttaaagctaatgaacatcgctgtcttctcatcaagagaatcagcaggattcttattaaactcaaatattacaaaggttttaatgtccatttgctgtttatatatccataatgattttatataaacgttgttacatatttttgcgttaatattaagaggcttgaaattaaaggctcgtgaatagtcgaaaaatcctggagcagttattttcaaatcaatcccgtagtatctagacattgcttcactgttaaacgtatcaagacttgggcctgcatgcagtaccggtggaaagtaataatcaggaattatcgcttgatcttgtttgttatgtttcgccctgtctattatttcttccctaatctccgtttgtttgcttattgatttaattgatgagtaatagaggatgtatgatggaatgaaatataaaaaagccattgcatatgtagtaacagataaataaatggaagccttgttaaatttcgtaaatgcagaatgagcaacaaaggaaatcgaaagaatcataaagcagagtgctccattgagagccctgctgggcattgcaggagatgcaaggaacgcaacatttgcagcaattgcacccagtatgaataaaaagcttccaaacataagtttgctgctactattccttgataacactacagagattagtagtattataaatgcaatatagacctgccaatatgcccccattgctgatggcagcctttctgaaaagtgctcaagaaccctccatgcaagtggttgattgtaccagtcttgtattgtagacgcacgggataggtttcccggagccagcaggagaacccccgcgcctattgcagatccgaatacgccaatcagtaaatatttatttctattcattataaagaaatatgctacagaaattaatacaactacaagagatgtattttcatttgagcaacctgcaaatatcgatgatatggcatatacaaagagtattaaattggattttttaccattgcttaaatatatagaaattagtatataaatggcaatgaacatgttggtccataagtaatttgctgacccaacaagccagaagttagtttgaccgagggctggatttgcaatgaagtataagaaaaataagaaaatcatcacatatggggacggtgacgactttgttaatgtagctgggatcattgtccagcacaacaccattaatgttagcgctgctgagtttattgcattgtaaatatgcggggagaaaaactttaatagagatgtgctgatcgtatctgacacaacccttccgctccatcccaaatagtgcatttttacgctagaaagcgaaagctctcttagggcataagtatagtcatcagagttcattggtgtgataaatcctattgaatacaccaacgagaaaactataaggatagcaattaccatttttaatctattgttaaccatttttcttctcattcttaattatgtacttaggtctttttttggtttctatgtaaattctaccaatatattctccaagaatacctattcctatcaattgaacgccacccaggaaaagtacagaaacaagaagtgacgggtagccaggaacattatttccaaatattaatttatcaataatcatccatgcaccgtaaaggaatgacatacctgcaataaacaatccaatataagtccatatgcggagcggaaatgttgagaaagaagttattccttccagcgccagattccataatttccagccattgaattttgaatcgccggcaacacgttcagcgcgggcgtattcaactatatcagtcttgccgcccacccatgacagaacgcctttcataaacagattacgttctggcatctgtttaatattttcgacaacctcacgactcattaaccgaaagtcgccaacgttctcttcaattttcggattgctgattttattatgcagcttataaaaccattcagctgtcttacgcttcatgcgcccgtcagttgagcggtctgagcgcttagccagcaccatatccgcgccagcctgccacttctcaatgagatgggggataacttctatcggatcctgtaaatcgacatcaataggaatgaccgtatccccggttgcatggtcgagacccgcgaaaagagcaggttctttaccgaagtttcgcgtaaacgaaagcggaataacgagcggatcagatgcagctattttgttaattattgattcagtcgcatctttgcttccgtcgttgatgaaaacaatctcaacttcatacggttttagctcttcaaactcgcgaaccgttttatagaaaataggtatcgtggcttcttcattgaagaccggaacgactaacgagattttcatttcgcatccctaaagacaatgaactttgaataaatgaatccgcatatcaggctgatagctgaaaaggtgacaagagtaaggagtggcggcagggaacatttgtcagccatccagccaacaacggcgctcagtgttcccataaatcccacgtacatcatgtagcgaagcgtggtggtgctggcgttaaaggtgaagcgcgcattggcatagaagctgaacgatacggcgataacaaaaccggaaaagttcgccaacgcctgatgcgtatgcatcccatacacacaaaaagcaaatacgccccaatgaataagcgtgttaagaacaccgatcgatgtgtacttagcgaataacttcaacattatgaaaatcagcggattcggaaaggtctggagtgtagcactacaaattgctttgatcgatataaacgatcaataatgtggtattcaatagtttaaagttattgttatcttattaattgatcgttgttaccgatcaattggggctactgattgcttagtagtttgggacaaaaacgggacacacaaagctttgcatcggcttgcaagtctttgcatgtttttcgaggatggggcgagtgagcgccgtagtaatggaataacttgttgttagctcaggtagttccaggaacatctaagccgtgggtcgcaggttcgaatcctgcagggcgcgccatttaacctctcaaaattatgttaatccgtaagcttctgcggcggcgacgttgcgccatccgcagtacgtgacgctaatatgcaaataactaattgcgtttaatctgtttatggtgctcctcagcctggatctcgtgggagaaagaatgggcattattcatcgattgatggatgaccattgctttttcatagccgtccatttcagaaaaggatgtcgcattttccacagtagccggggcgctggttttctgtgtctgagccatttgctgatgcgcgaaggcgtcaccgttattcatcatctcatgcgccgtggcggataattggcgagattccattttctctgcggcttttacgccagctgaaataaaaaaacgacagctaaaagggatgtaaacttattcatcttatttctccggtgtgggttaataagagaaataataaaacagtcgttggggctggcgcgtgacaggataatgacgattatatcagattattttgctggctagtgatagcgcctttcactatcgctacagttcaacggaggtatttgggtaatgtcaaaataaaacgagtagcgcgcgtatcggaggtgacagaaacttttccctgatgcgcagtgacgatggattttacaattgccaggcctataccgcggccttcccctttacgctggcgggagggagtaacgtgataaaaacgatcgaaaaggcgcggcaaatgttccggcgcgattggcgtaccggggttttcaacaataatatgtatctggtcgtccgcttcttttatccgaagagtaatggttttacccggcggcgtatagcgcatcgtattagagagtaaattactgatcgctctgcgtagcatgatgggatcgccggtgattcagcaggcgcggccttcaaagcgcaagctcccaacaccttttcggcagaaaaactcgatgaggcgctttaccacggggcggtgctccgggtgcggccaaaagccatgacggtagcggtgattatcgccggtctgctacctgttttatgggggaccggcgcgggttctgaggtgatgagccgtattaccgcgccgttgctgtcgctgttcatcattccggcagcctacaagctgatgtggctgcgcaggcatcgtcgccttgcggcataacgtgtgtcgcccgcctgcggcgtcaaactgtaggcgggttcagtatacgtttatcgttcgagcgcgctgacccgtttgcggtactcgcctggtgtacaaccgaattcacggacaaaagctttgtgaaaagaagattcgctcgcataacctaccgactcggcaatcaccatcaccggcagcgcttcacgcgacagggtctgggcggcgatttgcaggcgcagcgttgttaacacggctaagggcgtcgtagcggacacgtcgcgaaatagctgggcgaagctcgcccgcgacatgtgtacccgttgcgccagcgtttcgaccgtccagggatgcgccggtgtttccagcatgtgaaggatcacgcggcccagccggggatgcagcaataaattgagcacacttttcgcggtgccggcctgcgatagccagtcgcgaacggcgagggtaaacagcgtggcgcactgctgactgtataagacgtcagcgccaggtaaatggcgttctgactcctgctgtaacagcaaaatggcggcgttaagccagatactggcggggctatgcagcggcggggcaagacataacacttccggcaacgcggtaaggaaataacgtgacgtcgtgtgcagacgtagactaccgcacacgatatgtgtcggtgcttcgccagactggcgcaaacggtgggcggagttttgcggcagaatcaccacctttcccggcgtaagcgtcatggcgtcgccggtaggcatttccagttgcgcttcgccctgcgtaacggtatgccagcgaatcaccgatagctcgccagcggcgtgcggtaactgccagtcgccgcctaacgggcaattcttgtcgattgagccctgaggggcgttaagcgtcaatagccgactaagcgcatccatatagactccagaacagatttattttcaaaaatagggatcaccatttctgtctttgatcactatatttcggactcaatgtcatttctacccttgtttttgctaaacgccaatttagacgataagacaaaaaatgacgcgttgcggataaccctgtcttttttgacgttatttatacttgtcctgacaaacagatggtgatttggcggagaaagaagatgacacagtatcaggcgctcattattggttttggcaaggcaggaaaaacgttggcggcaactctggcgaagacgggatggcgcgtggcgattatcgaacagtccgccagtatgttcggcggaacctgcatcaacattggctgcattccaacgaaaacgctggttcatgacgcggaacgtgagggcgatttttctgtcgccatgcaacgcaaagcggcggtcgtaaattttttacgcgacaaaaattttcataatcttgccgacctggacaatgtcgatgtgattgagggaagggcggagtttattgataaccataccttacgggtatttcaggcggacggcgagcgggtgttacggggagaaaagatcttcattaatactggcgcagagtcggtgatcccggctattacgggcttaacaacgacggcaggggtgttcgatagcaccgggctactcagcctgagccagcgtccggcgcggctggggattttaggcggcggttatattggccttgaatttgcctcaatgttcgccaacttcggtacgaaggtcactatctttgaagcagcgccgcaattcctgcctcgtgaagatcaggatatcgcgcaggcaattacccacattttacaggaaaagggcgtcgagctgattttaaacgccaacgtacaggccgtatcctcaaaggagggcgcggtacaagttgaaacgccggaaggcgcgcatcttgtggatgccctgctggtggcgtcggggcgaaaaccggcgacggctggcttacagttgcagaacgccggcgtggcggtgaacgaacgcggcgggatcatcgtggatgattacctgcgtaccacggcggacaatatctgggcgatgggcgatgttaccggagggttgcagtttacctatatttcactggatgattttcgtattgtacgcgacgggttattgggagatggcaaacgcagtacccgcgatcgccagaacgtcccgtattccgtctttatgacgccgccgctctctcgtgtcgggctgacggaagaacaagcgcgggcaagcggcgcaacggtgcaggtggtgacattaccggtggcggcgatccctcgcgcccgtgttatgaacgatacccgtggcgtactaaaagcggtagtggacgtgaatacgcagcgtattgtaggggtgtcattgttatgcgtcgattctcatgaaatgattaatatcgttaaaaccgttatggatgcagatttaccttatacggtgttacgcgaccagatatttacccatcctacaatgagtgagtctttaaacgatctcttctctctcattaagtaaaacataaataatgtagccctgttaatcagggcttttttttgcctgtcagaccataaaaatacgccaggacaaatatgctggcgtctgaaagaaaaggctttagtcaggcgtaacgtattataacaccattgaaataacccacgactggaaatctcgatgttaaaagttaccacacttattgcttcattattggctgcgccgctggcgttttccgtctccgcccagccgctaactgacgttgaatatatcagcgtttctgcggtgtcagcaacgccgtcaatgcttgaagacgctattgccagactggcgcaaagtaaacaggcgtcgtcatggaaaattacgtcaatgcgtattgataatacgggttacgccactgcgatattatataaataaggagagcctgagatggataaatatcttcgtctgttaagtcagggggatcggcttggattaacattaattcgcctgagtatcgccatcgtttttatctggattggactactaaaatttgtgccctatgaggcagacagtattaccccgtttgtggcgaacagcccgtttatgtcttttttctatgaacatcctgaagaatatcgtcagcatctgacgcatgagggcgaactaaaaccggaggaacgcgcctggcaaacggccaataatacgtatgcgttttcggatggtctgggcgtggtggaattgattatcgcggtgctggtactggctaaccctgtcagccgctggttagggctggcgggcggcgtgctggcattcctgacgccatttgtcacgctgtcgtttttaatcaccacgccggaggcctgggttatgccgctgggcgatgcgcattatggtttcccgtatttatcgggcgctgggcggctggtattaaaagatacgttaatgctggcaggggcggtgatgatcatggcggactccgcccgttcgttacttttacagcgacagtagcgaccctcttaccctcttaccctctttatgccgcgattcgtcgggtggcgcttgcgccatccgacaatgtgttgatgaatgatggactaccctgacagaagttcctgttccacctgttgaacctgcgcctccagcgtattgcgaatttcggttagcgcccgttcctgctcggagaaataggcttccttatccgcaacggaagaggcgagccgccaggcgttttccgtttccagctgcgttatctctttcaacagcgcgtcgatttgcgtgcggagctggcgtattttatggcgcagatgttccaggttattgagcctgtcgcttgccatcatcggttccagaccgctttgcagctgcgtcaataacgcgcgaattgccgccagatcggcattctgccgcgcctgattaagttgtaccatcatctggtgcgctttttcttttaattcatcggcgaccacatccgggtgacacaggcggctggcctgacgccacaaacgttttaattcattgcgttcgtcagccgacaaacgttgatcgcgagcgtagcggaattgcgcttcctgctgctgctcccggtactggtgatagtcctgttccgcattttcctgcgcctggcggaatgcgctgtcgtcctgatgggaaaaatccgcttccagctcgcgaatttccgccagcaacgcggtaattaattccgtctgctgctggattcgctgacggatgcccaccgcttcgcgcgaggcggcattcaatcctgtccactgctgttttagcgttgccagttgatccacggcctgggaaataaattgcaggcaggattgataatccttttcccggcgttttatttcggcttcttgcttacgctgcatactcaccgcgagctgtttacgcaactccagaatacggctcatcaacggcccgagacgcagatgatagaggtcgttgaaatcgtcgaggatttgtacccgcgcatttcgtttgtcaatcagatcgcgaagttgggcttcaagcgctttcagctccagtttactggcggcaatagagggatcttgccacgtcgagagcgcccgttgagcctgtagccaggcggcgatctcttgcatggcgtcactgaatcgacgagcttcaatcgcctgggcaatcgcgctgattacggcatcctgcggctcatttttcaggtagatgagctgctgacggataatctcttcgtcctcaagttcgatggcgcttttgatgatctctaaacgtttgatgatcttattcatgacgttgatgcctggcgtggctcaaaaacggataacagataccaggtctgattcacctttttgaaaatactgaaaaaatactaaatgtattctgtagggtgtcgtacttttcgtccagagttattcacatattttatactcggcgtctgtcacccgtaacgttctatatcggcgcgcactcttttctttttactccccgcgacatctttttttacacgataacgttaacgtccggagttgagccttgacaaacgattgcgccttgcggcagcgagagcgaaatgttaaaaggtgcccctcaataaaaacgatacaggggtaggacgtgaaaaacgcgtcaactgcatccggcgccagcgtgtcggatgccgcgtcgaagaatgaaccgacgcttcagcgggggttgcaaaaccgccatattcagctaattgcgctgggcggtgccattggcaccggactgtttctgggcatcggcccggcgattcaaatggcggggccggctgttttgttgggctatggcgttgccgggattatcgcttttctcattatgcgccagttgggtgaaatggtcgtggaagagccggtttccggatcgtttgcccacttcgcctggaaatattgggggccgtttgcgggctttttgtcgggctggaactattgggtcatgtttgtgctggtcgggatggcggagttgaccgcggcgggcatctatatgcagtactggctgcctgacgtaccaacatgggtatgggcggcggcgttttttattatcattaatgccgtgaatctggtgaacgttcgtctgtatggcgaaacggaattctggttcgcgctgattaaagtgctggcgattatcggcatgataggttttggtctgtggctgctgttctccggccacggcggcgaacatgccagcattgataacctctggcgttataacggtttcttcgctaccggttggcatggtttgcttctgtcgctggcggtgattatgttttcttttggcggactggagctgatcggcattactgcggcggaagcgcgcgatccgcaaaaaagcatcccgaaagcggtgaatcaggtggtataccgtattttgctgttctacatcggttcgctggtggtgttgctggcgctctatccgtgggtagaggtgaaatccaatagcagcccttttgtgatgatcttccataacctggacagtaatgtggtggcttcggcgctgaatttcgttattctggtcgcgtcgctttcggtatataacagcggcgtttattcgaatagccgaatgctgttcggcctgtccgtacaaggcaacgcgccgaaatttttaacccgcgtcagccatcgcggcgtaccggtgaactcgctgatactttccggagcgattacctcgctggtggtgctgatcaactatctgttgccgcaaaaagcgtttagcctgttgatggcgctggttgtcgcgacgctattgctaaactggataatgatctgtctcgcgcatttacgttttcgcgcggcgatgcgtcgtaaagggcgcgagacgcaatttaaggcgctgttctatcccgccggaaactatttgtgcattgcgtttctggcgctgattctggtgttaatgtgtacgatggacgatatgcgattgtcggcgattttgctgccggtatggattgtattcctgtttatcgcgtttacagttttgcgccgtaaggctcattaacttttttgcccgatcccatgctcatgcgatcgggcaatccattaatgccgcaatgtccctgacagagcacgaatatcgctgccggtcggcgtctgatgaatacgcaagccgaactcttccaccacggcaaaaatatggtcgaaaatatcggcctggatgctctcatattccagccacacgacggtattggtaaaggcgtagatctctatcggcaaaccatgatcgtcaggcgccagttggcgtaccatcagcgtcatgtctttacggatgcgcggatggtggcgtaaatattcgttcagataggcgcgaaatgtcccgatattggtcattcggcggtgatttaaggctgattccggcgcatccagttgtttattccattcatcgatttcctgatgacggctggtaaggtacggctttaacagttgcgcggttaatagccgctgtttttcatcatcatccagaaaatggatactggtcgcgtcaatattaatgctgcgtttaatccggcgtccgccggacgcagacatgccgctccagtttttgaacgagtcggaaaccagcgaccaggtgggaatggtggtgatggtattatcccagttgcgtacttttaccgtggttaaaccaatatcaatgaccgcgccatctgcgccatattttggcatctccagccagtcgcccagtttgagcatatcgttggcggaaagctgtataccagcaaccaggccaagaatcgggtctttaaagaccagcattaataccgcggccatcgcgccaagcccgctgattaaaattgctggtgactggccaatcagcagtgagatcatcagaatgccgacgataattgcgccgatgagcttaatgccctgaaatattccttttagcggtaactgagaggcggcgggccatttttgcgatagattgaaaatcacgtccagcagagaaaataacgacagcagggcgtaggtcataatccataactgcgcgcaggtcgtcaggatatccgcagcctcactgcctttttgtagccagagcgcggcctgaatattgacaatgatgccttgtagcgtaaaagccagacgatggaataatttattctgggtaataatttgcagccacaggcgggaactggcgctggcgcgtttttcgaaagcgcgcagtactatccagtgcaaaataatatgcacgacaactgctgtcagaaaaataataccaaatatcaccaccagcgacgtggtgtgattcatttcaattcccgctaaatcttctacctgggatatcaattcctgcataatctctcctttataaacagcagcctatgatgactgctgaatggcatttatgcaaatcaggacgcctgcgcttcaggcataatcagcaacagacgggtaaaagcgcctctggggttatccatacgctatattttatccagcgccctgtaaacgtcgtcattttacgcggttccctctttttgaacaggcgccagtccgtcaacaatgaatgaaaactttttaaccagaatgtttaaaacgattgcaatatctctgtcggataatgattagcaccgtcgtatctatcaacaataacattaaggaacatcggatgacccaaaagcgtaccctgctaaaatacggcatactctcgctggcgctggccgcgccattatctgcctgtgcgtttgactctcttacggtaattggcgatagccttagcgataccggaaataacggtcgctggacctgggatagtggtcaaaataagctctacgacgaacagttggccgaactatatgggctggcattaagcccttccagcaatggcggttctaattatgccgccggcggcgcgacggcgaccccggaattaaacccgcaggataataccgcagatcaggtacggcagtggcttgccaaaacggggggaaaagccgaccacaacggtttgtatattcactgggtcggcggaaacgatctggcggcggccatcgcgcgacctgccatggcacagcaaatagccggtaatagcgccactagcgcggcggcgcaggtagggctgttactggatgccggcgccgggctggtcgtggtgccaaacgtaccggatattagtgcgacgccaatgcttctggaggcggtaatcaccgccgggctgggcgcagcggctcccccggcgctaaaagcggcgttagaggcgctggcggagggagctacgcccgatttcgccagtcggcaacaggcgatccgcaaggcgttgctggcggcggctgcaacggtaagcagcaatccgtttattcagcaactgctcgttgagcaactgctggcgggctatgaagcggcggcagggcaggcgtcagctctgaccgatgattataatcggatggaagagaaggggctggagcaacacggcggcaatatagcccgtgccgatatcaacggcctctttaaggaaattcttgcccacccgcaggcgtttggtctgacaaataccgtaggtatggcctgcccgccgggcgtatccgcttcggcgtgctcctcggcaatgcctggatttaatgcgtcgcaggactatctgtttgccgatcatttacatcccggtccgcaggtccataccattattgcgcaatatatccagtcgatcattgccgcgccggtacaggcgacatatctgaaccaaagcgttcagtcgatggcgcaaggtagtcgtaccacgcttgacagccgttatcagcagcttcgccagggggaaacccctgtcggttcgctgggcatgttcggcggatacagcgggggatatcaacgttatgataataatgaggccgacgggaacggtaatcataataatctgacggttggcgtcgattatcagcttaacgagcaggtactgctgggagggctgatagctggttctctggataagcaacatcctgacgataattatcgttatgacgcccgtggttttcaggccaccgtattcagccatttgcgcgccggtcaggcgtggctggatggcgatttacactatctgtccgctaaattcagtaacattcagcgcagtatcacgctcggtgcgctaagacgggtggaagagggcgaaaccaacggtcggctgtggggcgcgaggttaaccagtggttatgattttgtcatgatgccgtggttaacgaccggaccgatgctgcaatatgcatgggattacagccacgttaatggctatagcgagaagctcaataccagtacatcaatgcgttttggcgaccaaaacgcccattcgcaggtgggtagcgctggctggcgtctggatctccgccacagcatcattcactcctgggcgcagattaattatcgccgtcagtttggcgatgatacgtatgtggcgaatggcggccttaaatcgaccgcgctgacgtttagccgcgacggaaaagcgcaggataaaaactgggttgatatcgcgattggcgcagattttccgctgtcggcaacggtgtccgctttcgccgggctggcgcaaacggcagggttaagcgatggcaatcaaacccgttataacgttgggtttagcgcccgattttgatgatacgccagggagggccaactccgtggtgacaatatcgccatcgtaggcgcaaaccggtgtcacgccgttttctccttcatccagatggggggtatccagatatggcaaacggcgtgccagttttaaatattatttattttcaatagtttgaaagagaaagttaacactggcgatgtaaaacctggcacttcgcgccattgatcattggggaacctggcagaaaggtgaaaaaagccggacgggcgtccggcttaggcaggggattaaacttccgtcagtgtggtttcaagcggcagacgtgatttcggcagcccggcgttgaaatcctcgacgctatgatggccgaccggcaccacgaccagactggtatagcctttttctttcagaccaaattcagcgtcgagcacctcggcgtcgaaaccttcaatggggacggcgtcgagacccatcgcggcgacgcccagcagaaagttgccgacgttcagataaacctgcttcgccatccactggtggtcatctttcagcgagacgcggtgcatatcggcgaaaaagcggcgacctttatcattttccgctttagcttccggcgtagcgaaacggccatcagcatcttcctgatcgacgacgcgctcaagccatgcgtcatccattgcggttttggcgcagaagaccaccacatgggaggcgtccagcattttgcgttcgttgaacgtgtagtttccggcagcggattttgctacgcgcgctttgccttcttccgtactggcgacaataaagtgccacggctgggaattggtgctggaggggctgtactgtagtagtgtttttattttatccgcttcttcggcggtcagttttttgctgggatcgaacgccttagtggagtagcgctgtaaggcgacagaaacgatatccataaatgctcctggttggtttagtacccttttgtatcagcagggtaccgggttatcggtaaaaagataagggaggaaaatgcggaaacggttattgcatcagcgcggtcgcaggcgcagttgctctcttttaggcagcccgtctacgaccagattccatgagtcatttatcaaatcgttgagtagcgagacggtgatatcctcgcccgcatagactgaaatccagtgtttcttattcatgtgatagcctggcgcaatgctggggtaaatttgttgatttaccagggatttttggggatccgacttcaggtttaccactgggcgacagtgatgttcagtgaacagcatgaatattttgccgccgactttaaacacatcgtactgtgggccgaaaggccagcagtgttcggtaaaaggcagttccagcgcaaagcgttttgcacaggcgtgcagtgtttgaccgtccattattgctcctcgcgagtcagcgcgcgccacatcgcttcgaatcccagcgcaatatattcgccagcgcgagcgggatcgcgcgcggcgaaatccattgttgtttcagccagcgccagaaaaaggccgtcgccgaaggcgcggtactcatccgacataaacaccatcaaaacggaacgatgacataaatcgcgcaattcggggaacatatcgtcggcccgttgttccgtctctttggtgagcttttcgctgacggccagttgacggatcgcccggtggcgcgcgggatggttcagaccccaactgatgtaactgttccagataaagcgggtcatcgttttggcatcggtaatggatcgatccagctccattatcattgactggcagagatcctgctttaaatgcaaatacaacgtgttaatcagctcatctttggtcgcgaaatagcgaaacaatgttccttctgcaacacctgcgttacgcgcaatcaccgccgttgaggcggcgataccggattgcgctatcgcctgggttgccgcttccagtaatgcttgttttttgtcttcactcttcggacgagccactacacgttacccttatgtctggaaaaacatgattgaatcatgcccgttgtcgcgtcgcaacggtgaatgtcaacctttgaaaagtaccttgacggcgtatctttgctttctataatgagtgcttactcactcataatcaagggctgccgcatgaagtggtagaaaagcctattgcaggccatgcgataagccatctcacaatttgtgtggttattactatgcttattgctgttgccgtaaatgtgcggtgcgggagccgctgacgagtttgatagaggggagagcacgatgaccatttccgctcaggttatcgacacgattgtcgagtggattgatgataatttgaatcagccgttacgtattgatgatattgcccgtcatgcggggtattccaagtggcacctgcagcgcctttttatgcagtacaaaggggagagtctggggcgctacgtgcgtgaacggaagctaaaactggcggcgcgcgacctgcgcgacaccgaccagaaggtgtatgatatttgtctcaagtatggttttgattcgcagcaaacctttacgcgcatttttacccgcacgttcaacctgccgccaggcgcttatcgtaaagaaaagcatggtcgtacgcattgaaatgtttaatcggccagcgaaaaccagcgccgccagataaagcgaatgacataatattccagcgcgccgagcaacagaaaccataaacaaaacaacaaagtataaagctggttgagatccataagatgaaagatcccgaccagtttttgcgccagcgcaaggccgagcgaaggggcgggcagcagcaggctggagagcaacgccatcagcaaaataccggcagcggtcatcaatgattcaagcgggtgtttcatggctttgttaaacgtaagttaaaacgccattgtccgggatatcgcctggtaaggcaaatatgctgtctattgtcccgcccagatttcacaatgtttttgtaccagacctatcagcgatccgccgtcggcaataaactcccgcatatattgcgcttcgttaccgccttttttcacctgcagacgtagcgcgtcaatggcgctgtcggcgcccagcttgcgcgcagagggggtaacgttgtccagcagacgcagcgtatcatctgccaggcgacggcggtcgccggtataggcatcggttatcacgccctccagaccatagcggcaagcctgaaaacggttgaatttatataacagatagtcttgttcctgcggtttaaagggacgctcggtcagcagccagtgcgcggtcgcctgaatcaaccctgccatattgatggcatgatcaagggtgagcggcgtatccatcacccgaacttctaccgtgccaaaggccgggttggggcggatatcccagtgcaaatctttgatgctgtcgatcatcgtggtgtaagacagacggcgaaatagtccggcaaactcttgccagttactgacccacggcatgggaccgttatcgggaaaagcggaaaaaatattcaggcgcgcgcaggcaaaacgggtgtcagatccttgcatatagggagacgcggcggagagcgcaataaagtgcggcacaaaatgcgacagcccgtgtaaaagataaatcgcatcgtcgccattcgcgcagccgacgtggacatgctggccgaaaaccgtcgcctgttgaattaagtagccgaaattttccagcgtgcgttgatagcgctcattatcacagacctcctgacgctgccatttttgaaaagggtgcgtaccgccgccgcaaatgccgagatggtgttccgacgccgcctgtaaaataacgtgctgcatggcagaaagttgggccgccgcctggtcaatatcgcggcagacgcccgtggccatctccagcatactttcggtgatatcgtgcttaatttctcccgcagtaagttggggcttaacggcgtcgatcagcgtagaagagtcctgacttaaatcgtagccaggtggattgatcacctgcatctccagctcaataccaagcgtataaggttcagaaacgtgaaaatcattcagcgccatagcgatctcatttatcgggggattgcgctaagtatagaagcgggagcgctcctgtcgtggggaaagcgcgttattgcagaaacaagagtaataacgctattgctacgttgaaaccattctgtacggacggtacgttcagccatcatggcggcaaaggctggcagcagatgtaacgagatgtgcgtggcggtaagcgaggtaacttttgcgctatcgaatcccgggagcgtgacgcggtctgaaaaggctttataaacgctctctttggcggagaaagccagcgtcagggcaagcggaaaagggagcgagctcgcctggagaatttggcgctcatcgctatcaataatggacggcgccagctctgtcgccgtgtgttgactcatgattttttctatatcaatgccgatacgctgttgggatatgacggccagcgccgttgtcgcacagtggctgatgctgccaaataggccgtccggccatagcggctgtcgcttgtcgcccataccgggcactgtcctgacgcccacctcgcgtagcgcatgaacggcggcaatgcggcctgccagatgttcagctttacgcttgcgtccggcagaccggagccgatcgtgatgaggtagccatagcaggtcgtgttcgcgaaagctgctcgcatcaaagtcgacgatatgcagcctgtgtccggcaaagggaaggggaaaatgagatgtcagcatcgtttttgccaattccctccccgaatgagggagggaaggttgccatcagaaatgggtattaatgctcatataccacgtacgtcctggttcgttataggtgtacgcgccagcgcccgccatataagcgccagtttgagtatccctgacggtttgcgcgttaccttcacgccacagacgtttgtcaaagaggttatccacgccaccggtcaggctgacatttttggtcacgtcccaggtcgcgctcaggccaacaatactgtatgggctgaccgcttgcttatctgttccggtaacggggttaccctgataatcatatttcttcggctcttgtttgccgtaccaggtgaaggttgattgcagagaaacgtcctgacgtacctgccagctcagggttgagttaagcgtgtactgtggaataatcgacaggcgttcgccggtctctttgtttttactctgcagcatatacgtaacgttattcgtccagttgacggtgtcgctaaccggtacgtttaacgtgccttccagaccttcaacgaccgctttcggcacgttctcccactgataaacatccgttttgccgttgttgatacgctgcaacggcaccgtacccgcttcaatcttattgcggtaatcattgcggaaccaggtgatgccggccagccagccatcgcgtttaaattccagaccgatctctttattgatgctggtttcggctttcagatcatcgttacccatcatatagcagccgatgccggtacccgcgccagtcgcgtagcaaccctgacctttactgtacaaaatatagtttgggttagtctggtacagactcggggctttataagcgcgggcgatccccattttcagagtaaagtcatcccccagaccttgcgacaggttcagcgacgggctccagttatcccccacaatactgtgatgatcgaaacgtagccccggcgtcagcatagtgctgtcggtcagttccatgttgttttcagcaaacagagagaaaatttccgcttttgaataggggctacgattggtactgctgtaacccgggatatttccccccataaaggtttgcgagttggagagctcgtctttcatacgctgttgggcccattcggtacccagcgtcaggttttgatttaccagcagatcgaaaggaaggctcacttcgctgtgtagggtgacgtcattcaaatcggcatcggcatatttttgcgatgctttgggatcgaaaattccttcggtgccgcctgccaggccttccggcatccgggagttacgggtatgttcgtattgcacccagttactggtggttacgccattattccagccgccgttccaggtcagagagtagttctgccgatagaggcggtttgtctcttttccgtaattatctttcaccagttggttcgtattggtgttctgagtatcgccggcatagaggttgccctggcgactgtaaccggcctccagctccagagactgaagcggagcaaaatcccaacgaaccacgccgttgatatctttgttaatgaccccctcgcgtccggctggtaacgtgtcggcgtaactcccggtacgttcagactgatgcccctggttaatattacgcgcatccgcctgcgttttgtcgaggttgccatacagacggaagctgaaatccccgcccagcgggccgttcaggctaaagttagtgcgtttggtcgcgccttcgtctttatgttccggcgcgttgaaataggtattccaggagccgtgccactcgctaccgccttttttggtaatgatattgaccacgccacccgccgcgccgttaccgtagcgtgcagcggcagggccacgcagcacttcaatgcgttcgatcatctccggcggcacccacgcggtatcgccacgggtatcgcgttcgccgcgccagcccaggcgcaccgagttacggctggtgacgggtttaccgtctatcaggataagggtgttttccggccccatgccgcgaatatcgatttggcggttattcccgcgctgaccgctggtggagttgccggtcaggttcacgcccggcatggtgcggatgatttctgacacgtcgcgcgcgggcggatttttgcggatctcatcggcggtgatggtggatacgcctggcgcctgtaggttttgctgggcagcggtcaccacgatggtgtcttcattggtgagcgcagcgctatcggttttgtcttccgccatcacgggcagagcggccccgtaaatccctaaattgaccagtaaggtcagggaatgaatcttcttgttcattgtatatcctgcttttctttagccacataagccaaagcgcccgtcaaaggcattggccgggtggtgaaattgtgttcgcgcgtcccatagcgcgacaatacgctattgcaaatgcaaatagttatcaataatattatcaatatatttcaccttttatatacaaaattcataataaacacagggttataatgaaagaggcgctggcaacgggaagtaaggcctggtggaggacgaaaaccgggccggaatggatacgggaaaaagacggaaattatcgggtcactttttggtggcgcgacccgcagggaaacgaaacacactccccgatacggcgtgtctgggtctacatcactggcgtaaccgatcatcatcaaaacgcgcagcctcagacgatggcgcgtattgccggaacggatgtctggcgctggagtacggcgcttagcgctaactggcgcggcagctactgttttattcctaccgaacgcgatgacgtttttgccgcttttgcgccgggcgaaacgcccgatcggaacgcactgcgtgaaggctggcgacagctattaccgcaggcgattgccgacccgcttaattcgcaaagctggcggggaggacgtggtcatgcggtttcagcgctggaaatgccggatgcgccccttcagccgggatgggatcgtcctgaaacgccgtactcgccgcctttgatgatgcagtggcatagcgcacgtctgggtaactcccgccgcgtatggatattgacgaccggagacgaggcgccggaggaaagaccgttggctattctgctggacggtcaattctgggcggaaaatatgcccgtctggcccgcgcttgcctcgctgactcatcaacgcctgcttcccggtgccgtctatctgctgattgacgcgattgatactcaccaccgcagccaggagttgacctgcaatgccgacttctggctggcagtgcagcaggaactgttgccgcaagtcagagccgtgacgccttttagcgatgatgccgggcgaacggtggtcgccggacagagctttggcggcctgtcggcgctgtatgccggcctgaactggccgacgcgttttggctgtgtactaagccagtcaggatcgttctggtggcctcatcgcatcaccccgccggagggggaagtcattacccggctgaaaaccggcgcattatgtgcgcgcggactgcgtatcgtactggaagccggcgtgcgtgagccgatcgtgtttcaggcgaatcaggcgctttatgcccaactgaatacttcgcagcagtccattttctggcgtcaggttgacggcggacacgatgcgctttgctggcgcggcgggctaacgcaagggctgatgctgctttggcagccgcttatcgacacgctttaaccgggcacatgtccatgacaggagttgagtatggaattcagtaatcccttcgataatccgcagggacagttttacatcctgcaaaatgcgcagcgtcaattcagcctttggccagcggcgtgcacgcttcccgcaggctgggacgtggtatgcgaaccgcaatcgcaggacgcgtgccagcagtggcttaatacgcgctggacaacactgaatccggcgcattatgccgataagcaggaggcgaaatgacgcagcgtttaccgttagtcgccgctcagccggggatctggatggcggaaaaactctctgatttaccctccgcctggagcgtggcgcactatgtggaactgaatggcgagctggatgccgccttgctggcaaaagcggtagcggtagggatgcaacaggcggatacgctacggatgcgttttaccgaagagaacggcgaggtctggcaatggatagatcctgagcacaccttcggcgagcccccgattgccgatttacgcgaccatcccgatccgcatcacgcggcgctggcgttaatgcaggcggatttacggcaaaacctgcgcgcagatagcggtaagccgctggcgtttcaccagttaatccgcattgatgatacccgctggtattggtatcagcgctatcaccatttgctggtggatggctttagcttcccggcgataactcgccagattgcggcgatttatcgcgcctggcagagcgacgctcctacgccggagtcgccttttaccccctttgcggatgtggtcgaggaatatcagcgctatcgccagagcgaggcctggcagcgtgacggcgccttctgggcgcagcagcgccgcgagctgccgccgccggcgtcaatgtctgccgcgccgttgccggggcggtcggcgagcgcggatattctacgtatgaaattgaacgcgccggcgggggcgtttcgccaactggcggcgcacatgcctgagataccgcgagcggatcttgccctggcgctggtgacgttgtggctgggacgattatgcgggcgtatggattatgccgccggatttatctttatgcggcggatgggttcggcggcgttaacggcgaccgggcctgtccttaacgtgttgccgctggcgattaaccttcatgcgacggaagatctgccaacgctggcgaagcgtcttgcggcgcagttaaagaagatgcgccgccaccagcgttacgacgccgaacagattgtacgcgatagcgggcgagccgcaggggagacgccgctatttggcccggtgctcaatataaaagtgtttgattatcatctggatcttcctggcatacaggcgcaaacccataccctggcgacggggccggttaacgatcttgaactggcgctttttccggatgaaaacggcggtctggatattgaattgctggcgaatgcacagcgttacgatgatgccacgctctcccgccatgccttacgattgatggcgcttatcacgcagtttgcggataacccggcgctgcgctgcggcgatgcgcaaatgctgctggcggaagaacaaacgcaattagcacaccttaataatacggcggtaacgattcccgccgccacgcttagcgatttggtggcgcagcaggcgcaaaaaacgccagaggcttccgcgttggcagatgcgcattatcactttacctaccgtgaaatgcgcgaacaggttgtggcgctggcgtacgcgctgcgggaacgcggcgttcagcctggtgatagcgtggcggtggcgttgccgcggtcggttttcctgaccttagcgctgcatggcattgtcgaggcgggcgccgcctggctgccgctggataccggttatcctgacgatcggctgcgaatgatgctggaagatgcgcagccgaaactattaattacgactcaggcgcagctggcgcgctttcacgatattccggggatggaatatttgtgttatagccaaccgctaccggtcagtgacgccactccgctggggctgtcgttaccgcatcataccgcttacatcattttcacctctggctcgacgggcaggccgaaaggggtgatggtgggacaaacggcgatagtcaaccggctgctgtggatgcaggctcactatccgttgacggcggatgatgtagtagcgcaaaaaacgccgtgcagttttgacgtctcagtatgggagtttttctggccgtttatcgccggggcgaaactggtgatggccgagccggaagcgcaccgcgacccgctcgcgatgcagcggttctttgcgcaatacggcgtcacgaccactcattttgtgccgtcgatgctggcggcctttattgcctcgctcacgccagcgtcggcggggaaaagctgcgcttccttaacgcgcgttttctgtagcggcgaggccctgccgacggcgctgtgccgcgaatgggagacgttaaccaacgcgccgctacacaatctgtacgggccaacggaggccgcggtggatgtgagctggtatccggcctgtggcgatgagctggcggctgttgacggcaacagcatcccgattggttatcccgtctggaataccggtttacgtattctcgatgcgcatatgcagccggtgccgccgggcgtggctggcgatctctatcttaccggtatccaactggcgcagggctatctggggcgtccggatcttaccgccagccgttttatcgccgatccttttgcgccaggcgaacggatgtaccgtaccggagatgtggcgcgctggctggattccggcgcggtggagtacctggggcgcagcgacgatcagctcaaaattcgggggcaacgtattgaactgggcgagattgaccgcgtcatgcaaacgctgccggatgttgaacaggcggtagcacatgcctgcgtctttaatcaggcggcggcgacgggcggggatgcccggcaactggtcggctatctggtgtcgcactccggtttgccgctggatttaccggcgctgcaggaaaaattacgccaaaaacttcccgcgcatatggtgccggttgtgttgttgcaacttgccggtttgccgcttagcgctaatggcaagctggatcgcaaagccctgccgctgccggacctgacgccgcgcgtgaaagggcgtgcgccgcagtccgcaacggagattgctgtcgccgcggcgttttcccgcctgctgggctgtgagattaacgacgttgaaagtgatttctttgcgctgggcggacactcgctgctggcgatgaaactggccgcgcagctaagccagacgtttaaccgccaggtgacgccggggcaggtgatggtggcgtctgacgtggcgcagttaagtaagctgctcgatactgacgatgacgaacgctcgcgcaatctggggttcgggccgctgttgccgctgcgtgaaagcgatggtccaacgttattttgtttccatccggcgtcggggttcgcctggcaatttagcgtattatcacgctatctcagcccgtcgtggtcgattatggggattcagtcgccgcgccccgctggccctatgcaaaccgcaaccacccttgatgaggtatgtgaacatcatctggcgactttgctcgcccggcagccgcatggcccttattatttattaggctattcgctgggcgggacgctggcgcaagggatcgccgcccggttgtgcgcgcgcggcgaaaccgtggcgtttttggggttactggacacctggccgccggaaacgcaaaactggcgggaaaaagaggcgaatggcctcaatccggacgtattggcggaaattgaacgtgaacgcgctgcgtttgtcgccgcgcagcagggaaatgcctccgacgccttatttaccgccattgaaggcaattatgcggatgccgtccgtttgctgacgacggcgcatagcgtaccgtttgatggacatgctacgctctttgtggcggataaaacggtgccggaaggcgtatcgcctgaacagagctggtcgccgtggatagcgtcgttggctatttatcgccagccgtgcgcgcatgtagatattatttctccctccgcttttgaaactatcgggcccatcatcagcgaacttattaataaataacgggcgttgtttctgcctttaacaaattaaatcctgaaacccataataattactaattattatgggttttttattgcaactattaattcttttaacataagtgatacatgctacaggcaagtttaattccgaatatttagcttttcgggcactggcgcgtaaagattgtttcggataattctgacttgctgttagaatctctgacaggaatgtgttctttcattggataaagttttcaggtcatacggcatgccatctcttaatgtaaaacaagaaaaaaatcagtcacttgcaggttattcactgccgcccaccaacagtcatgaaatcgatttgtttagccttatagaggtgttatggcaggcgaaacgtcgtattcttgctaccgttttcgcctttgcgtgcgtggggttgcttctgtcctttctgctgccgcaaaaatggactagccaggcgattgtcacaccggcggagtcggtacagtggcaggggctggagagaacgttgaccgcgctgcgcgtgttggatatggaggtaagcgttgatcggggcagcgtatttaatctgtttattaaaaagtttagctcgccctcgctgctggaagaatatcttcgttcttctccgtatgtcatggatcaattaaaaggcgcgcaaatagacgagcaggatcttcaccgggcgattgtcctgctgagcgaaaaaatgaaagcggtggacagtaatgtcggcaagaaaaatgaaacgtcgttattcacgtcgtggacgctgagttttaccgcgccgacgcgggaagaagcgcaaaaagtgctggctggctatattcagtacatctccgatatcgtcgtgaaagagacgctggaaaatattcgtaaccagctggaaatcaaaacccgctatgagcaggaaaagctggcgatggatcgggtgcgtctcaaaaatcagcttgatgccaatattcaacgtcttcattattcgctggaaatcgccaacgccgccggtattaagagaccggtttacagcaatggtcaggcggtaaaagatgatccggatttttctatttctctcggcgcggatggtatttcccgcaaactggaaattgaaaaaggggtaacggacgtggctgagatcgacggtgatttgcgtaaccgtcaataccatgttgaacaactggcggcaatgaatgtgagtgacgtgaagtttaccccgtttaaatatcaactgtcgccgtctctgccagtgaaaaaagatggcccgggtaaagcggtcattattatcctggcggcgttgattggcggtatgatggcctgcggcggcgtattactgcgtcacgcgatggtctcacgtaaaatggaaaacgcgctggcgatagatgaacggttagtctgatttacccgaaaagccggatagcgatatccggctttgtcatctgtgtgggcgactatcgccgccccaacggtaccaccagcggcgtaccggcaaccggatcgtcgataatcatacagcgcagcccatagattttttcgataagctctgcggtaacaatctctttcggcgcgccctgtgcgacaatattaccttcgcgtaatgcaatcaaatgcgtggcgtatcggcaggcctgattcaggtcgtgcaggacggcggcgagcgtataacctttttcgcggttgagatcgcttaacaactccagcaaatcaatttgatggctaatatccagccacgttgtcggctcatccagcagcatgatggatgtttcctgcgccagcaccatggctatccacgcccgctgacgttggccgccggacagagtgtctacactttgcgccgctagtgaggtgatacctgttgcacgcatggcactggcgacggcatcggcatcttccttacgccagcgggtaaataacggctgatgcggataccgccctctggcgaccagctcttgtacggtgatatcgcccggcgtggtagcgttttgcgccagcaatccgatgcgccgcgccacctctttactggcgtaacgctgtatttgttcgccatccagccagacatggccgtcaacaggcgtcatcagacggcttagcgtgcgtagcaacgttgacttgccgcagccgttagggccgatgatggcggtaaaatggccgtccggaatcgaaacattaaggttttttgcgacggtatagctgccataacccagcgttaactggtcgccgcgcaaacgggctacggattcggtcattttttgcgggactcctgaattaacaagacgataaggtaaataccgccgaggctgacggtgaccacgcccactggaagctgataaggcataaacagttgctgcgcgcacgcatcggcggccagtagtaataatgcgccgcacagcgccgactgggttaatccccagcgcgctgtgccgctaagacggcgggcgatgtgcggcgcgacaagggcaataaacgagatggggcctgccagtgccgttgccgcagcggtgagcgacaccgccaccagcatcagcatcaggcgtgaccgctccacgctaacacccagcgcgcaggcgctgtcatcgcccatctccagcagccgcatacgacgcaccagtagcgcggcgcctgtcagcattacaataatcagcggcgctgaaggccaggtttttgcccatgtcagaccgttgagcgacccggcgttccataagccggcggtgagcgccgtttccagcgacgcctgcaacagaagccaggtattaaaggcgactaacatcgcgcggatgccgataccgatgataatcagccggaaagtttcaatcccgttacgccaggcgagcagccagacaatcaatgacgtgacgataccgcccgccattgccgccagcgcgatcgcggtaagatgctggccaaacaggaccattgcgaccagtacgccgctccaggcgccggtattaaagcccatcacatcagggctgcctagcgggttacgcatcaacgactgaaaaatcgcgccactgacgccaagcgcagcgccaatcagcagcgccattaatacgcgcggtagtcgccattcggttacgacaagggtgatgttacgcggcgcgtcgcccagcagcgcggcaataatctgcccggtctcaagaggcacggcgccgctttgcagactccataagccaatggcgaagcagccagccgccagaagcaggcaacttacgataagccgacgagaaagaaacatcacaggccgcctccgttcgatttacggcgtaccagaaagataagtaccggcgcgccgataaacgcactgacgaccgatacccggagttcgcccggcaccaacagacgaccaataatatcggcaaaaagcagcagagcaggggtggccagtagcgtcactggcagcgaccagcggtggtctgcgcccaccagccaacgcgccatatgcggcatcatcagaccaataaaggcgatagggccgaccagcgccgttgcgctgccgcacaagacggtaatcgccagtaaaccgataagttgggtgcgcgccactttactccccagcgccgtcgcggtatcgctgccgaggctcaggctgttcagcgctcggctcagaaatagcgccacgatcccagcgataaccacgggcgcgagcgcgactttcaacgtttgcaggctacgaatgtccagcgatcccgcctgccagaagcgaagctgatcatagacctctggatttaacagcgcgatgccgctggtcaatccttccagtaccgcgccaagcgccacgcccgccagtgtcaggcggaccgggcttaactggccgccgccctgactaccggtgaaggcgacaatcagcgatgcgataagcgcgccgctaaatgccatgaaaagctgctccagcggcgtggagaaaccaaacagcgccgcgcccagtacaatggcgaagctggcgccgttgttaacgcccagaatccccgggtcggcgagcgggttgcgagtaagtgtttgcatgagcgccccggcgaggcccaacgcgccgcctgccagtaatccggccagcgtacgcggcaaacgcgcatccaggacgatggtgcaatcggcgctttggcacacgccggtgaacgcctccagcacgacggcggcgggcagcggtttcgcgccaatgaccaggcttaaaaccgcggcgagactcagtaataacaacaatccgggcacggcaaacgcgcgcgtcacggaaaacgagcatgacatagtaacttccatgataatgatagtaattatcgttatctatcttatttggttatgttagcatgtgcagccattgaatggatatttaaaaaaactcgcattaaggcgttgtaatgaatcgacaatcctggctgctcaatctcagcctgttgaagacgcaccctgcatttcgcgcagtatttctggcccgttttatctctattgtctcgctggggctgcttggcgtggcggttccggtacagatccaaatgatgacgcactccacctggcaggtagggctgtcggtaacgttaaccggcggcgccatgtttattggcttaatggtgggcggtgtgctggccgatcgctacgaacgcaaaaaggtgattctgctggcgcgcggtacttgcggtattggctttattggcctgtgcgtgaacgcgctgttgccggaaccgtcattgctggcgatatatctccttggcctgtgggacggctttttcgcgtctctgggcgtgaccgcgttactggcggcgacgccagcgctggtcggaagagaaaatctgatgcaggccggcgcgattaccatgctgacggtacgtctgggatcggttatttccccgatgttggggggcatattgcttgccagcggcggcgtagcctggaactatgggctggcggccgccgggacgtttattacgctattgccgttactgacgctgccgcgactgcctgttcctccgcagccgcgggaaaatccttttatcgcgttactggcggcatttcgttttttgctcgccagtccgcttatcggcggtattgcgctgcttggcggtctggtgacgatggcaagcgcggtacgcgtcctctatccggcgctggcgatgagctggcagatgtcggcggcgcaaatcggtttgctgtatgcggcaattccgctgggggcggccattggcgcgctgaccagcggacaactggcgcatagcgttcgtccggggctcattatgctggtttcgacagtcggttcttttctggcggtggggctgttcgccatcatgccggtctggatcgcaggtgttatctgtctggcgctgtttggctggcttagcgccatcagttcgttattacaatacaccctgctgcaaacccagacgccggaaaatatgctggggcgaatgaatggcctgtggaccgcgcaaaacgtcacgggagacgctatcggcgcggcgctgttaggcggtcttggcgcaatgatgacgccggtcgcttccgcgagcgtgagtggattcgggctggtgattatcggtttgctgctgctgttagtgctgggcgagctacgccgttttcgccagacgccgccggttagcgatgctggctgatgaaggggcgtttatccgactgacaaaatcggtctggtcagtcggataagactccgataaggctaaaacagggcggcaagccggttaagcaacaatgttgcgctgtaataatccagacggaacgtctccgtacccagggcatagacgcgcttattttgcaccgctggcaggtgcgccagcagcggattggcgtaaagggccgcaacatcgttgttgtcgccggcaaacaggaaaagagattcaccgtttaacccggcggccagattttcaccgccaagctgaatgatatcgtggcgcttaccctggcttttgctggtttgcagccctcggggcaatgtcgccagcgtaaagcctaactgtgtcaatagcttgccttgtgctgattctggcgtccacagattggcgctatgcgcggcaggggtatacaccagcgcgctaaccggctgcggcggcagggcgattcgctgtttaaccgtcgtcagttgcgcctcaaattccgctattcgcgcggcggcctgtttctcctgaccggtgatctcgccaagttgcgtgagcaaactctgccagcttttatcgtcataattgatgacgagtgtcggcgcgatagcggagagctgatcgtaaagcgccagcgcggagtcgccgccggtggcgctaatcaaaatgagatccggcatttgcgcggcgaccgtttcggcattcggttcgccgatgtacagccgggcgacatggcgagcctttgctacgtcgctccactggcgcataaacccttgatcgtcggcaaagcggttattcggcgtagtggctccgctggcgacgacgggcgcatcaatcgccagcagcgagcctgtcaacgtcacgctggtagagacgatacgcgcgggtttgtggtccagagtatgaacgccgcggctgtcctggatttgccggggccaaccggcgtcctgggctaaggatattcctgaaattgatataccaaccactaaaagcagccaacgataaaaggcggggagtctcacaatagcgtcctgttattaataaagttaatgcttctcattttcatgtcagcggcagcgagatgcaagccttagtgccatttaactcatgaccagagttgacagagcgacgttttactcttaggttagcgcactaaaaatagaaataataatcattattatacacaaaatcattcaagaagcatcgcaacggcaagggaagaaatccccgcgggcatagataactgtgtgaccggggtttctgagcgcagccaacaaagaggcagcttgaaagatgaagtgtatataagcctttatcattggaggatgatatggatatgtcactggccgaggacgctcaggagacaatggcaacgcttgctcccgatcgctttttcttcatgtcgccgtatcgcagttttaccacttccgggtgcttcgcccgttataccgagcctgcggttgccggagattcgccggatagccctttccagcagaaattgcgccagcagtttgccgaggccaaatcgcagggcatcgccaaccctatcctggtgggggcgattccctttgatacccgccagccgtcgtcgctatttatcccgatggcgtggcagtccttttcccgccagcaaaagcagcgcacggcgcgttattttactgaccatcagtcgctgacggtgacggcgcgaaaggcgattccggagcaggatgcttttgaagcgatggtcgcacgcgcggctatgctgaccgccacgccagacgtcgataaagtggtgctttcccggctggtagatatcaccactgatgtagcggtggatagcggagcattgctggagcggctggttgcgcagaatccagttagttacaacttccatgtgccactggcggatggcggcgttctgctgggcgccagccccgaattgctgctacgcaaagagggcgagcggtttagttcgctgccgttagcaggctcggcacgccgacagcccgatgacgttctggatcgcgaggcgggaaaccgactgctggcttcacaaaaagatcgccatgaacatgagctggtgacgcaggcgatgaagcagatcctgcgcgatcgcagcacggaactgcaattaccttcctctccgcagttgatcaccacgccgacgctatggcatctcggtacgccgtttgagggcaaggccaacgccggagaaaacgcgctgacgctggcctgtctgctgcatccaacgcctgcgttaagcggtttccctcatcaggtcgcgaaaaagctgattgctgaactggaaccgttcgatcgtgaactgtttggcggcattgtcggctggtgcgatgccgaaggaaacggcgagtgggtagtgacgattcgttgtgcgaaattgcacggtaatcaggtgcgcctgttcgccggcgccgggattgtccctgcctcttcgccagtcggcgagtggcgggaaaccggcgtcaagctctctacgatgttgaacgtttttggactgcattaaggaacgatgatgcgtatacctttcacccgttggccggatgaatttgcccgccgttatcgtgaaaaaggctactggcaagacgtgccgttgaccgatattctgacccgccacgctggcagcgacaagacggcggtcattgaaggcgagcgcgcattcagctatcgccagctcaaccaggccgcagataatctggcctgcagtttacgccgtcagggcatcaaacctggcgaaaccgctctggtacaactggggaatgtaccggaactgtatatcacctttttcgccctgttgaagcttggcgtagcgcccgttctggcgctgtttagccatcaacgtaccgaacttaacgcctatgcgatgcagatcgcgccgacgctggtgattgccgatcgccaacatacgctgttcgccggggaggactttctcaacacgtttgtggctgaacaccgctctgtgcgggtggtgttattgcgcaacgacgacggcgatcacagcctggacgcggcgatgcggcaggcggcggaagatttcaccgccacgccatcacctgctgacgaagtggcctactttcagctttccggcggtactaccggcacgccaaagcttattccccgtacccataacgactattactacagcgtgcgccgtagcaatgagatttgcggttttaacgaggagacgcgttttctgtgcgcgattcccgccgcgcataactacgccatgagttcgccgggcgcgctgggcgtctttcttgccaaaggaacggtagtgctggcgaccgatcccagcgccacgctctgtttcccgctgatcgaaaaacaccagattaatgccacggcgctggtgcctcccgcggtcagtctatggctacaggctatccaggagtggggcggtaatgcgccgctggcgtcattaaggttattgcaggttggcggcgcgcggctttctgcgacgctggccgcccgtattccggctgaaattggctgtcagttgcagcaggtcttcggcatggcggaagggttagtgaactatacccggctggacgatagtccggaacggattatcaatacccagggaagacccatgtgtccggacgacgaagtgtgggtggcggatgccgacgggaatccactgccgccgggcgagattggtcgtctgatgacgcgcggcccctatacttttcgcggctatttcaacagtccgctacacaatgccagcgcctttgacgccaacggtttttactgttccggcgatctgatctccattgatcaagacggttacatcaccgttcacgggcgtgaaaaagatcagatcaatcggggcggcgagaagatagccgccgaagagatagaaaacctgttactgcgccacccagcggtgatccatgtggcgctggtcagcatggaagatgaactgctgggagaaaaaagttgcgcatatctggtggtaaaagagccgctgcgagcggtacaggtacgccgtttcctgcgagagcagggcgtggcggaatttaaattaccggatcgcgtagagtgcgttgcgtcactgccgctgacgccggttggtaaagtcgataaaaaacaattacgccagcggttggcgtcacgttcaccgctctgaaggagaaagagagatggcaatcccgaaactacagtcttacgcgctgcccaccgcactggatatcccgaccaacaaagtgaactgggcatttgagccggagcgcgctgcgctgctcatccacgatatgcaggattactttgtcagcttttggggccgcaactgcccaatgatggaccaggtgattgctaatatcgccgccctgcgccagtactgtaaggaacatcatatcccggtctattacaccgctcagccgaaagagcaaagcgatgaagatcgcgcgttactcaatgatatgtgggggccgggactgacgcgctctccggaacagcagaaggtggtagaagccttaacgccggatgaggcggatacggtgctggtgaagtggcgctatagcgcgtttcaccgctcgccgctggaacagatgttaaaagataccggacgcaatcagctcatcattaccggcgtgtatgcgcatattggctgtatgaccaccgctaccgatgcgtttatgcgcgacattaagccgtttatggtggcggatgcgctggcggatttcagccgggaagagcatctgatggcgctgaactatgtggcggggcgttccggtcgcgtcgtcatgaccgagtcgctgctgccgacgccggttcctgccagtaaagcggcgctgcgggcgttgattctgccgttgctggatgagaccgacgagccgctggatgatgaaaacctgattgattatggcctggattcagtacgcatgatggggctggcagcgcgctggcgtaaagtacacggcgatatcgacttcgtgatgctggcgaaaaacccgaccattgacgcctggtgggcgctgctttctcgcggggtagagtaatggcctgtattgatttttcagacaaaacggtatgggtgaccggggcggggaaagggatcggttacgcgacggcgctggcgtttgtcgacgccggggcgcgggtgatcggcttcgatcgcgaatttacgcaagagaattatccctttgctaccgaagtcatggatgtggcggatgccgcacaggttgcgcaggtgtgccagcgtgtgttgcaaaaaacgccgcggctggatgtgctggtcaacgccgccggtattttgcgtatgggagcgaccgacgcgcttagcgtcgacgactggcagcagacatttgcggtcaatgtgggcggggcatttaacctgttttcgcagacgatggcgcagtttcgccgtcagcagggaggggcgattgtcaccgtagcctcagatgcggcgcatacgccgcgtatcggtatgagcgcttacggcgcctctaaagcggcgctgaaaagcctggcgctaaccgtagggctggagctggcgggctgcggggtgcgctgtaatgtggtgtcgcctggttcgactgacaccgatatgcagcgcacgttatgggtgagcgaagatgccgaacagcagcgtattcgcggtttcggcgaacagtttaagctcggcataccgctcggtaaaatcgcccgtccgcaggagatagccaataccattttgtttcttgcctccgatctggccagccacattaccttgcaggatatcgtggtggacggcggttcaacattgggagcctgacgatgatctggaaacggcatttaacgctggatgaattgaacgctaccagtcagaacacgctggtggcgcatctgggcattgtttacacccgtctgggcgatgaagtgctggaggcggaaatgcccgtcgatgcccgcactcatcaaccgtttggtctgctacacggcggcgcatcggcagcgctggcggagacgttaggatcaatggcgggttatctgatgacccgcgacgggcagtgcgtggtcgggaccgagttaaacgccacccaccaccgcgccgtctcgcaggggaaagtacgcggcgtttgcctgccgctgcatctggggcggcagaatcaaagctgggaaattacgctctttgacgagcaggggaggcgctgctgcacctgtcgcctgggaacggcggtaatgggatagttctggcaaagtaaaatgcaattgcagcattaacgaagaaaggaagtgatctggttaacactgtaatgtaaaaaatgggtaacaatccggttttatcatgttgttgtgttgttaattacggtaaaggtgttatagaaacaaaatgtaacatctctctggaacacccaaacggacaacaactatgaataaatcagggaaatacctcgtctggacagcgctctcagtattgggtgcgtttgccctgggctatattgcgttaaatcgtggggaacagatcaacgcgctatggatcgtggtggcgtcggtctgtgtctatcttattgcgtatcgtttttatgggctctatatcgccaaaaaagtgctggcggttgacccaacgcgtatgacgcccgcggtacgtcataatgatggtctggattatgtcccgaccgataaaaaagtgctgttcggtcaccattttgcggccattgctggcgcaggtccgctggtcgggccggtactggcggcgcagatgggctatctgccggggatgatctggctgctggcgggcgtcgtgctggcgggagcggtgcaggactttatggtgctgttcgtctcgacccggcgcgatgggcgttcgcttggcgagctggttaaagaggagatgggcgcgacggcaggggtgatcgcgctggtggcctgctttatgatcatggtgatcattctggccgtcctggcgatgatcgtggtgaaagcgctgacccatagcccgtggggaacgtacactgtcgcgttcactattccactggcgatttttatgggcatctacttgcgttatttgcgtccggggcgcatcggcgaggtgtcggtcattgggctggtatttcttattttcgctattatttccggcggatgggtggcggcaagcccaacctgggcgccgtactttgattttactggcgtgcagcttacctggatgctggtgggttatggttttgtcgcggcggtactgccggtctggctgctgctcgcgccgcgtgattacctctctaccttcctgaaaattggtacgattgtcggtctggcggtcgggattctgattatgcgtccgacgctgactatgccggcgctgaccaaatttgttgatggtaccggaccggtctggacgggcgacctgttcccgttcctgtttattaccatcgcctgcggcgcggtctccggtttccatgcgctcatctcctccggcacgacgccgaagatgttggccaacgaaggccaggcctgctttatcggctacggcgggatgttaatggaatctttcgtcgccattatggcgctggtctccgcctgtattatcgatccgggtgtttactttgcgatgaatagcccgatggcggtactggcgccagcggggacagcggatgtcgtagcttctgccgcgcaggtggtcagtagttggggtttcgctatcacgccggatacgttacaccagattgccaatgaagtcggcgaacaatccattatctcccgcgcaggcggagcgccaacgctggcggtagggatggcctacattttacatggcgcgttgggcggcatgatggatgtggcgttctggtatcacttcgccattctgtttgaagcgctgtttattctgacggcggtggatgcgggcacccgtgcggcgcgctttatgttgcaggatttgttgggcgtagtgtcgccagggctgaaacgtaccgattcgttgccagcgaacctgcttgctacggcattgtgcgtgctggcgtgggggtatttcctccatcagggcgtggtcgatccgttgggcggtattaacaccctgtggccgctgtttggcatcgctaaccagatgctggcgggtatggcgctgatgctttgcgccgtggtactgttcaaaatgaagcgtcagcgttatgcgtgggtcgcgctggtgccgacggcctggctgctgatttgtacgctgacggcgggctggcagaaagcgtttagtccggatgcgaaaatcggcttcctggccattgccaataagttccaggcgatgatcgacagcggcaatattccgccgcagtacaccgaatcgcaactcgcgcagttggtattcaataaccgtctggatgccgggctaaccatcttctttatggtggtggtcgtggtgctggcggtcttctctattaagacggcgctggccgctctgaagattgataaaccgacggcgaatgaaacgccgtatgagccgatgccggaaaatgtggatgagatcgtgacgcaggcgaaaggcgcgcactaatctttttacatcaatagccctctccagaataaggagagggcatttgaatgacaggtgacaacgatgttcgatacgctttcgaaagccggaaaatatctgggacaggccgcaaaaatgatgattggcgtgccagactacgacaactatgttgagcatatgcgcataacgcatccggatcagacgccgatgacctatgaagaatttttccgcgagcggcaggatgcgcgctatggtggaaaaggcggcgcgcgttgctgctgagggttgccaggcctgataaacgcaacgtcaccaggctatattctgaaaaattcaactttttcaaacgccgcacgcagggtgtctggcgttaacgtcaccggtaaatagtggatggattcgaccgggcgcagggtatgcgcgatgaccctatcgatctcggcggtgttatgaatatccacgtccagttcgctaagccgggccggcagatgaaatcgccggtacgctgtaatcaattgcgccagcacgtcatcttgtcccagtagcgcgctttgcaccagaatgccataagccactttcgttccgtgcaggaatttttccgtttgcggcagaacggtcagaccgttgtgtaccgcatgggcggcggcgacacgggtatagcgttccccgaggccgccgaccataccgccgccagcgataatcgcatccaccacgtcgcaaaatgcctgggtcagccgacgctgctgtttatccgctaatgcttgttcgctgctggtcagcaggagatcgcgaatagcgcacgcgctgttaatgcccagtcttacggtcaatggcaacgtttcaggctgcggcgcaagcacaacggcttcataccatttcgccagcgtatcgccaatgccagctaacagatagtcatcgggcgcctgcagaataatgcgcggttcgaccagcaccagaaaattggcatcatcaaaaatttcgaactgtaacgcctgtcccgcgtcgttataccagacggaaagcggtgtccaggcggcgcaggttgccgcgattgtcgggatagcgacaaacggcagcgccagacggcgggcgagcgctttggcggtatcgagcagcgcgccgccgccgacgcctatcaccacctgacgatcgtcgttgcaggcgtgcgccagttgggcaacatggcgttcgctacaatggccggtaaacggcagatgctttgcgccagcacgttcaaacgcttccggcaggtaaggccgggcggcggcaatcgcgcgttcgccgtacacccaaacggcgtgggaaagctgttccggcgtgaaaaagtcggtcagtctttcgaggcttcctgcatgggaaaaataattcgccgggccggtaacgacgcggatctcagtgtggttcatgttgtgttatccttagggtcttctcaccgttgttattatatttagacatctaaacgtcttgattgccaaatactaacaccctgtgatagtgtgtcaacaaccacatcactggcgggtatgaagataatgagaaataacccactgattccaaaaagcaaattgccaaatcttggtaccacgatttttacgcaaatgagcgcgctggcgcagaaacatcaggcaataaatttatcgcaaggcttccctgattttgatggtcctcgttatttgcacgagcggttggcttatcatgtcgcgcagggcgcgaatcaatatgcgccgatgacgggggcgcaggcgctgcgggaggccattgccgataaaacggcggaaatatatggttatcgacccgatgacgtcagtgatatcaccgtcacagcgggcgcgacagaagcgctgtatgcggcgattaccgcgctggtgcgggcaggggatgaggttatctgtttcgatcccagttacgacagctatgccccggccgtggcgctctccggcggagtgttaaaacgcatagcgcttacgccgccgcattttcgcgtcgactggcaggcgttttcggcgttgcttagcgagcgcacgcgactggtgatcctcaatacgccgcataatcccaccgctaccgtctggcgccaggcggatatcgaggcgctgtggcaggctatcggcgagcgggaaatttatgtattaagcgatgaagtgtacgaacatatttgttttgccgccgaaggtcatgccagcgtactggcgcaccctcagttacgagagcgggcggttgccgtttcatcgtttggtaaaacctttcatatgacaggatggaagattggttactgcgttgcgcctgcggccattagcgccgaaatacgcaaagttcatcagtacctgacgttttgcgtcaatacgccggcgcaactggcgctggcggatatgctgcgcgccgcgccggaacactatcgcgcgttacccgatttttaccggaaaaaacgcgatgtgttggttaacgcgctggcgcaaagccgattaaaagtgctgccctgtgaaggtacctattttctgttaatcgattacagcgcagtgtcgacgctaaatgacgttgagttttgtcagtggctaaccgaagaagtcggtgtcgccgctattccgctctctgtcttttgcgccgcccctttcccgcatcagcttatacgtttatgtttcgctaaacaggaatcaacgctgccggccgccgcagagcgcctgtgtaaactgtagttatttaaccgtccacgctctggagaatcgacggtctgcaaaaagctcctgcaggccgttgatctgtttcaggcgcaggacttcatcggcgtccatacctaactcctggccgattttgctctcgtcccagcctagcagagaaagttcgcgcacgatttctgacatggcgtggatctggtggcgcccgcgcgcgcggttatgccgaatggttgccgccatgcgttcgtgacgttctctgtccagacacgttatcggcaggtagcctttcagacgccttttcagggccgcttttcctttgcccagctcatgacggtgaaaaccgtctacaatctcgtactcctccgtattggcctttaccaccacgatcggctgagtaaacccatcttgttcaatcgatttaagcagcagttttttctccggcggcgcaacgttattcgggttgtagtcattaggtgaaatatgatcgtttttcacccacaggacacaatcgacaggctcatcgcgaaaaggactaacgctatgtatcgccattctaaattcattaatggcggcgatcctctcctcttcaggcagttcagagagaaagtgagttatttcggttgtgagtcggtgttgcataagatcccccattcctggcgtttagctttcatacgttcgttataacgctggtaattcttaggttttgtcggactgaatgacagcgcccggcaccagtaatcattgttcagtaatactttgcagatccgtcgccacgacggaatatcgcgcgatccgatatcgccatgctgcgtttgtgaaatggtgtgcatgccttttttcttataccactgcaaataaacggcgattttattacggtaatgttcggcagtgacttcaggcatactgtgtagcaggagcagcgcgtactcttcccagttaaggtgatcgggttttaaaattttccggtggccgtaaaaatggctgtcttgtccggcgtatattcctccgctgagtgcgccgctgactctggcgcacatggccgcccagcgctcaggttcgataacatgatacagccataacccctgtcgttgttccgggccgaacggttcgcaaatacgcatgtaacggggcggtactccagcctgatacatcaaattatacaaagggttacatggtttacctgttttggcgaaccaggtccagatatctgcggttttccagtcatagatgggatagatataccaggtgtgccctttaggggctaacgtggtccagggcttatcgtcggcaaagcgctgcttatgcgagttagcgatagcggcaaatcggttataggattcgtcggaacgaataccgaccagcatagcggcaggacgtttttctgaaaaccagtcggcaaaatcgcgaacgaactgttcaaaggtcatgccgtgttgataaaaggaaaaaaaggccggatcggtaatcgcatcttctggcggttgtcgtacccagtcggtacccggctgccaacactgccactccggctggtattgtgaaagggaattttgtgtggttaagggtaatgcgacccaataaaaacgctcaataacgtccgcgtagtattcacgtaacgattcaatataggcgatggtacaggagaattgcgcttcccagtcaatgaagagaacatggatctttttattcattttgcgcgccaacgttgccgtcaggtgcaacataagtcctgaatctttaccaccagaaaatgagacgcagacccggggtaaggtttccagggtccacattatacgctcttgagccgcttccagaacattttgctcgagcggaactttataaaccgacatctctggatagtctccgatgtgttaactacagtatattcgaaataattaacataaaggataagcagattagatgaacttgcaatgctttattatatttgtaaaataaatatattccataaacatatacattaaatttatattaatatccgttatctgaccttcttattaatgtttttttgtgatgtgctcaatgagctcagcaaatccgctattattcagcgaagccctattatacataagatagaattgtatgggagcaatggtaaaaggtatggtgacttttttaagtttgatagaggaagagtaatagtcaaaaaatgtttgtggtaaaaaaccaataagctccgtggagctgatagagttggcgatggtcatcagcgatttgcttctgaaaccaattattctttcccccagcacatcatccataagtgaatgatattctttcataccggttgcccgggagacgagttgcgtaaatgactcttgtagaatttcgtcgatagtggcggtgtcgcctagtcggggatggttttcactgcaaaccaggatgcattctagcctattaaagtgagtacaaacaatagaacgattattcagtggggccattgaaaccacaatatctgctttgcggtaggcaagcagatcttcaggcagttcgtcagtggtcaaaatgtcgtgatgttcaatttcaacctgtggatctttgcggatatatttaactaatttcatcacatattgggtgatcaacagctgtgggctgtagataataaattttttcttcaggctggactgattcattatattaatagtttgttccaggctgttaagattattttctaaatgataatgtaaattaatgcctgttacggtaggcgtaattcctttgcctgaacgaataaatagagggtcgttgaattgcgtgcgcaggcgttgcaatgactggcttacggcagaaggtgtaatatagagtgtttctgctgctttgctaatgcttaaatgttgatagatacattcaaatataaccaacaggttaagatcgaattttttaaggtcgtaaaggttagccatagtatgttcccggcattatcatggtatcttccatgattatgacttaatctcaataatttaccagagttatgtttattaaacttaatgtagagtttatttaaactaaaataccacagttatgaatattttagcgagtaaataattacagtaaaggcggacataacgtacacttttataaccacgccgttagtctaaaaaggctgtgtcggatgacatgctggtctggcgtcgcgttaatgccagtcagaggttggcccgacaaacgtagcgctatcgggcgtggtacggttaagctccagctttgctaatttctgcgttaaggctgccccatcatggcgtccagttgcgctttttccggtaaacccacaacctgttgcaaaatcttatctttattcatgtaataaattgctggcgtcgcgttagcgccaagatcgtccattagctgctgattctgattaatgactttcatctgcgccggggggatggacgccggaacctccagcttcatctttcctgcggaggcttcatagtcatgccaggttttcgccgggtctttcgcggctaaaatcgctgcggctgtggccgggctttccggtttaatcacgccgaccagtaatgtgcgtaattgtaccttgccggattcgacccacggacgagcttgttgccaaaactgcttacaataggggcagaaagggtcggcgaagacatacagcaccaccggcgcgtcttttttaccgtcgagtatccatgacgctttttccattttctgccacatttcacgtccggccggtgcatagatctctttttctatcagggcgttgctaagattttcgcctttttcattatacatatagccggaaatcgcgtgtttaccgtccggcgtcaggtaaatcgtgacgcccatatcctgatactttccgagatagcccttcatgccccccggcgcctcgaaggatttcaggatagttataccctgtttttcaatggctttaaccggcgcaggcagttcttccgcgtgggcgagaatgggcagcatagcaagcagcaatgtacgtttaatcatattttttccttttaatatcaaagcgaaaagagtattaatgatgatgcctatcacagacataggtaagagctggcgtgccaggattgccctttctgtgctggggtgatgtaatccttttcgctgttacagcctttgttaaggtaatgtagagcgcaacacttagccagcatatacgctatggatttcgagttgcagacaatacgtctgtaatttgcaagacgagtcgtactggctctgaagttacctacgggtagttcaggtaatggggccgcctgtcaggcggcctttttactttagatggctgacagggcgcagtgttcacaatgtcgcccgaaacgggttgttagttaacgcttattgatttgataatggaaacgcattagccgaatcagcaaaatttcgttaacttactcctcaacgaaaacacggaggaagtatagatgtccttaattaacaccaaaatcaaacctttcaaaaaccaggcgttcaaaaacggtgaattcattgaagtcaccgagaaagataccgaaggccgctggagcgtcttcttcttctacccggccgattttacctttgtttgcccgactgaactgggtgacgttgccgaccattacgaagaactgcagaagctgggcgtagacgtttattccgtctcaaccgatactcacttcacgcacaaagcatggcacagcagctctgaaactatcgcaaaaatcaaatatgcgatgatcggcgacccgactggcgccctgacccgtaacttcgacaacatgcgtgaagacgaaggtttggcagaccgtgcaacctttgttgttgacccgcagggtatcatccaggcgatcgaagttaccgctgaaggtatcggccgtgacgcgtctgacctgctgcgtaaaattaaagcagcacagtacgttgccgctcacccaggcgaagtatgcccggcgaaatggaaagaaggcgaagcgactctggctccatctttagacctggtcggtaaaatctaaatttccgtcgtctttcacgccatagctgcgttggcgtcgcctgctcaccccggtcacttacttcagtaagctcccggggattctcaggctagccgccttactctgacgtgaaatactttggaaattgtttcagtcatgggcgcacccgcgcccatttcatttcagcaccatgacgcaagttgcattaatgcagtcccgcgaagtcggcttgcatgatgatgttttcagagagggaagaagaatgctcgacacaaatatgaaaacccagctcagggcttaccttgagaaactgaccaaacctgttgagctgattgccacgctggatgacagcgctaaatcggcggaaatcaaggaactgctggctgaaatcgccgagctgtccgacaaagtcacgtttaaagaagacaatactctgccggtgcgcaagccgtctttcctgattacgaatccaggttctcagcaagggccgcgctttgccggttctccgctgggccacgaatttacctcgctggttttggcgctgctgtggaccggcggtcatccgtcaaaagaagcgcagtcgctgctggagcagattcgcgatattgacggcgattttgaattcgaaacttattattcactctcctgccataactgcccggacgtagtgcaggcgctgaacctgatggcggtgctgaacccgcgtattaaacatacggcaattgatggcggcaccttccagaacgaaatcaccgaacgtaacgtgatgggcgttccggcggtgtttgtcaacggtaaagagttcggccagggacgtatgactctgaccgagattgtcgctaaagtggatactggcgcagaaaaacgtgcggcggaagcgctgaacaaacgcgatgcgtatgacgtgctgattgtcggctccggcccggcgggcgcggcggcggcggtctactcggcgcgcaaaggcatccgtaccggtctgatgggcgagcgcttcggcggtcaggtgctggataccgtggatatcgaaaactatatctcggtgccgaaaaccgaaggccagaaactggcgggcgcgctgaaagcgcatgtcagcgattacgacgttgacgttatcgacagccagagcgcaagtaaactggttccggcagcggcagaaggcggcctgcatcagattgaaacggcgtccggcgcagtcttgaaagcgcgcagtatcatcatcgccaccggcgcgaaatggcgcaatatgaatgtgccgggcgaggatcagtatcgcaccaaaggcgtcacctattgtccgcactgcgacggtccgttatttaaagggaagcgtgtggcggtcatcggcggcggcaactctggcgttgaagcggctatcgatctggcaggtattgtagaacacgttacgttgctggagttcgcgccggagatgaaggcggatcaggtgctacaggacaaagtgcgtagcctgaaaaatgtcgatatcattttgaatgcgcaaacgacagaggtgaagggcgacggttcgaaagtggtggggctggagtatcgtgaccgtgtcagcggcgatattcatagcgtcgcgctggcagggatttttgtgcagattggtctgttgccgaatacccactggctggaaggcgcgcttgagcgtaaccgcatgggcgagatcattattgacgccaaatgtgaaaccagcgttaagggcgtcttcgctgcaggcgattgcaccaccgttccttacaaacagattatcatcgccacaggcgaaggggcgaaagcctcgttgagcgcctttgattatctgattcgtaccaaaatcgcataaaaagaagtaagcacacctgcaaggccagttaactggccatcgtaaatggcccgatagtgtaagctattcgggcctgcggtgtttatgcctggggaacgccactgggtaaaacaccttcttcattatcaatactctgaaaccgtctgttaataacagacggttttttatttcaacggtcttctgtttttaaactttgaaacaataaaaaagccttctacggatttaactggaatttttctgtttttttatcaaagaaagattaagcgcttccgctaacatgcccattcttttttcttgatttatattgcatttgtatgtgaggttatttattcatggattcaatctatgaatcactgacggaattagaaaaaacagggcttacattgcgtgatttttttaattctcatgatagtcattcactgaaatctgcctacgtgagattaaatccctctgctgcggtaaaccttaccgaccgggcgtggctggaagcggagtatgactttaatgcgctattcgtcggtcctggcaagctgctggctgcgcctttcgcttcagtgtatctggaggacgatgcgctggtgatgggaaaggcgacgctggagatacgggagtttatggcagcgttgggattatcggttaatcaggagagcaatattcctgacgatcatatttcctgcgtgctggagttgaccacactattactggctaatacccggcaaacgtcaccataccgatctactctcactcaatatatcaataactatttaacaaagtgggtgccattatatatcgaaaaaataaaaactcatgcacaaacgaccacgttatatacggtggcggacatcttattttattggcttgatgaattaaaacgagagtatcaatatgagtaatgagacaggacatctgaacagacgttcttttttaaaggggatagtggcactgggcgccgttgcggctttacccggaggattactgacctcccgatgcgcgcttgcgcagccgcctgttccctttaaccctaaaacgtacaaaatttatcgtaacgcgtgtccgcgtaactgctatgacacctgtagcctcaagacatgggtaaaggacggggtcattactttcgtggaaggcgcgccggaatcaacatttactcacggtaccccttgcgtcaaagggttaagctatccgcgccgggtttatagccccgatcgtattaaatatcccatggcgcaggacgttcgcggtagcggcaactggcgtcgcatctcatgggaagaggcgatgcagcgcattgccgccaaaatgctggagattaagaaaaaagacggttctatgctcggtctggcgctgaccaaatattccggtaagtttggcgtgctgaactatgccgttgaagggatgatgtcctcgcttggctacaccacccgttttgccggtacgccgtgctggcctgccggtatcgacgcgcaaaactacgacatgggcgacatgtggtgtaacgacccggaagatatggtgaaagcgaaatacatcattatctggggcgccaacccggcctggtgctcaatgcacagcatgaagtacatctatcaggcgcgcgagaaaggggcgaaggtcgtggttatcgacccgctgctgtcgcagactgccgccaaagccgatctctacctgcgcgtacggcctggctcagacggcgctctggcgctggggatggcgcgtcatctggtggataaaggcctggtggatcaggactttgtcaacaacgatgctcatggctatccggaatttgaagcctatctgcgtaataacgtcaccgtggagtgggcggcagaaatctgcggcctgtctgcggatgtcattcgccaactggcggaagagtttacggcggttaagccggccacggtctggattggttacgggatgcagcgtcatgtcaacggcggcgccaacgttcgcgctatcgatgcctttgtcgctatgtccggcaacatcggtgtcgaaggcggcggcgcgcgttatggccatctgcatacctggggctttaactataacgccatgctgcagaagccgccggtgggcgctattggcataccgggagcggcgggcaccaccagtgaattcggggctgccgctggcagcgacgccgtgcagtactccgatcgctctctgaatatcaaccagacggcgcaggggattctggaggccaacgatccgccggttcgtatgctgtgggtcgcctgtaaaaacccgtttgcccaggatttcgatcgcagcaagatgaaaaaagcgtttgaaaaactggaaatggtggtctgcgccgatcagttcttcaacgaaacggtgcaacacgctgatatcgtgctgcccgttaccaccgcgtttgaagagtggaacgtggatgcttcttactggcactactggctttccattaatcagccggcgattaagccgatgtatgaagcaaaatgcgaccttgaaatcgctaccatgctgtcgcgcaccattaataagatggcgccgggttcctgtaccttcccgcaagagttcgatcacaagcgctggctggatcaggagttcaacgacggtatggcgaaaatgtttggcatctcttcctgggacgatctgctggacgggccgaaaaaagcgatcctgccaagttctgccgcctggtacgaccgcaagttcaaaacgccgtcaggcaagtatgaatttaaatctgaactggcggagaaaaacggccataccgcgctgccggaatacaaaccggaagccgagagcaaactgcctttccatctgtttacgccgcacgtgcagtttggcctgcactcgcagtttatcaacctggactggatgcaggtgttctacccggaaccgttcgtttatatccatccttcttccgcacagaaaaaaggcatcagcgagaacgatctggtcaaagttttcaatggcaccggtgaagttgagctgcgggcaaaagtcaccaccaacgtgccggaagattttctggtgatgtatgaagcgtggttcccgaaacggcagtacaacgtgcaaaacgtcgtggccgatacgcctgctgatatggggctgatgaaaactggcgcgccgggcgccgctatccacagtcagtttgctgacgttgtattgatcggtaaaggggagtccgtagcatgagacgtgcgtttttagtgaatagcgataagtgcatcggctgccgtggctgtgctatggcgtgtaaaagctttaaccaactggagccggatcgcttctggcgctacgtttatccgttggataaagacatctatccacatgaagagcgggcgttttactcgctggcctgtaaccactgcgaacatccggcctgcgtcgccgcctgtccggtcgaagcctataccaaacgtgaagatggcgtggtggtgcataaccctgagcgctgcattggctgcaaaaactgtattcgtaactgtccttatggcgcgccgcgttttaatgaagagacgcgtaaagcggaaaaatgcagtatgtgctacgagcgtcttgatatcggtatgaatccggcgtgcgtaaacgcctgcccggtgggcgccttgtcgattatcgatttggattccgatcctgtgcccgataatgcggtgcagtatccgccagggttcccgcatatgccacagctcaatccaggaacgcgctttattctggcgcgccagcctaagcagccggaggacaagtaatggaaaaatatgaactgccgctggtgttttttacggtattaagccagatgtctgtcgggatggctttggtactgacatggcgtacgctgcgtggtgaagtggaaggccagcgtttctattggttggccaccgggctggtgctggcattggcgtctattgccgcgattctgcatctggcgcatcccgatcgcgcttatgatgcgctgattaacctgcgacatgcctggttaagtcgggaaatccttggcgccacgttgtttggcgcagcggtcggcgtaactttcctggcaaagggacataaagcgatggctcttatcgcctccgtgttcggcgtgttactggtggcggtgcaggggatgacctacgccgcgccagcgatggtagctatcgctaatggatttaccatgctgttattttttattacggtatgggtcatgggttgcgcggcgattccgctgttaagactcaggcctgccgttcctgcgttacgccagggaattgtggtgtgtaccgcggtacttatcgcggcgccgctggtgtggttaagcgggggaacggtcatgcagatgacggcgcgttcatggctggcttccccgttttatctggcaagcctggtttgccttgcgctcgcttttgtcgccagccgtcacggtgattcgcgcccgaaactcctgttcgtcttgttattcgttggcgtatttctgagccggctggtcttttttggcgacacggtgagtactattgtgaatatcgggcatttgtattaacgatgatgcagtaaaaagccctgccaggcgtgacctggcagggcgtgtcagtttttagccaccagggttaacgcacaaccaataccggcagcgtcgcatggcgcaccacgcttgaggcgttagatcccaacaggtgtgtcgtgatagacggattacgcgaaccgattaccacgacatccgcatccagttcttcgcccatctcattgacgacatcgcgcacgctaccaaagcgaacatgcgttttaattcgtgaaggatcgatactgaagtgtcccaccatcgtttgcagacgcgtttccgcctcatgctgtaaatgttcttcaaagcgacgcacgtcggcggcaaagcgatgcagactcatgctcgcggacccaggcagtacatgcaacagatgaatgacgccatcctgttgcgccagaaactcagcgtggcgaatggctttatcgctaagttccatttcaaaaacatcaaccggcataatgattgtcttatacatacccgttactccctgttaatcaatactgaatttattcaagcatataataatgtttctttctgctattcgtctggcaattttaaatattacggcaacctgacgttaaaaaagtcgtgtattttccaggaaaaatcctaaagccgcctgttttgccggcagtctctccgggatagctacccttttatagtcgaacgcaacattcaccgttaccccggaggctgcatgaaagcattgacgtatcacggtccacatcacgtaaaggttgaaaacgtacccgatcccggcattgagcagcctgacgatatcattttgcgtgttaccgccaccgcgatttgcggatctgatttgcatctctatcgcggcaagatcccacaggtaaaacatggcgatattttcggccatgagtttatgggcgaggtggtggaaaccggacatgatgtgaagaatattcgaaaaggggatcgggtcgttatcccgtttgtcattgcctgtggtgactgctttttctgtcggctacagcaatattcagcgtgtgaaaacactaacgacggacacggcgcgacgatgaataaaaaacagatcccaccgccggcggcgctgtttgggtatagccatctgtatggcggcgttcccggcggacaggccgaatatgttcgcgtgccaaaaggtaatgtcggtccatttaaggtgccgccgctgttatctgacgataaagcgctgtttctttctgatattttgcctaccgcctggcaggcggcaaaaaatgcccagattcagcaaggttccagcgtggcggtttttggcgcagggccggtaggattactgactatcgcctgtgcgcgactgctgggcgcggagcagatcttcgtcgttgatcaccacgcctggcgcctgcgtttcgccgaagaacgttacggcgcgataccgatcaacttcgatgatgagaacgatccggcggaaaaaatcatcgagcagacggcaggacaccgcggcgtggacgcggtaattgatgccgtaggctttgaagcgaaaggcagcttgacggagacggttctgacgaaccttaaactggaaggcagcagcggcaaagcgctgcgacaatgtatcgcggcggtcagacgcggcggcgtggtcagcgtgcccggcgtgtatgccggttttattcacggctttttattcggcgacgcctttgataaggggctaacttttaaaatgggtcaaacccatgttcacgcgtggctgggagaattattaccgcttattgaaaaagggttgctgaagccggaggagattgtcacgcactatatgccgtttgaagaggcggcgcgcggctacgaaattttcgaaaaacgcgaagaagagtgccgaaaggttatcctggtgccgggagcgacgtcggcacaagcggcgcagaaacaggcgacgggagtaatcaacccgatgccaggcggcgttgtctgaaacaggcagaaatgaaagggctaacggaaagaggatgcgcaggcatcctctgtgtaaacgcattaacgcttatgcagatggtttaacgcaggaagtcgcccgcggcttcaggctgatattcgagttccagcacttcgagatgggtggaggcgccgcccggcagttcccagtgaatggtgtcgccgacgcgcagtcccagcaacgccgcgccgacgggcgccattaccgaaagctgggtactgctatccgtcatattggcggggtacaccagcgtccgcacgcgtgtttcaccatcgctcaaattgcggaatttaacgcggctgttcatggtgacgacatcgttcggcatctcttgtggcgaacacatttgcgcgcgatccagttcggcgttgagcgcgtcggcaatcggcagatccgcatacgcaggctgttccagaagacgatcaatacgttcggcgtcaaggtcgttaatgataatagtgggtctggacatttcttactccatgtcatcgatactgcgagtagtgcaggtaaatggtcccaaaagaaaaccctcaccgtctggcggcgagggtttaactctcatgatgatactgagacttaccccgtctttgaagtgatttagttcacattcgggtaaatcctcaaacgtcatagccctgagtgaattttagtctacattcgggcgtgttctcaaatgtggctacggttttaaacctctgcttcgtcaataaccggctttatcgataataaactgtttcccgcagttgccgggatgcggctgcggctggaatgaggcagaggagagcggggcgttaatcatcgacgcctttaatgaaaactgaatctctgttaaataggcgggattgccatggcagtttactttaacggctttgacattatcctggccccacatttgtgcgacgacgctatcaaactcagcgcggctaacggttttgccgtaattatccgtcagaaactgccccagcgcgctgtcttttatcgccttatccagccgtatcatggtgccgaaataggcattgggatcaaacccgaaacaggcgccatgtttggcatattcgtagcgctccagacaggaattcccccccgcgccgggcatcacttccttaagcgctgtcgcgatgtcaggcgaaagtccgggggtgggggctgagcatttccggctggccttgacttcaggcagattcgggattggccgcgtcgcacaaccaaagcgctgccagcgtctctggtcaacaccgcgtgcggcgatagatttgggtaatcctggccacaggccgtggacggtcagaaagtctgctttgttggctggctctttttgcagacggcactcatcgggctcccgatggcggcgttcatgctggctttgacaaaaaccggtttgccaggaaagcgccagcacatagtcagtgaaatcaccgtactgttgcgcctgaagttcgtcggcgttggcggcaaaaatcggggttaagagggcagccagcagcggactgtaatgccatattgtgttcatgatgaattcgataatttatacacattatgaatgttacccatttaatcataaaaaatgccgctcaggtgaacctgaacggcatcatttttaacctgcgttggcgtaatgtttaattccacattgccagaatcggccagcccaccagcaacagcatcgcgatatagataacgccaaagattgcgccaagccgccagtagtctctggatttcacgtaaccgcagccgtagataatcacaccagggccggtggcatacggcgtcagacagcccatgataccgatagacagcaccagcagaatacacagttgttccatcggaacgcccggaatgcctttacccaccgccagaatgaccggcagcatggtcgcggtgtgagcggaaagactggcgaacagatagtgcgcgaaatagaacaccagtaccagtacaatcacggttgcatccggcgagaaaccttccagatgcgtactcatggtattggcgaaccagtcaataaagccggagcgggttaagccattggccatgaccaccagcgtagcgaggttcaccagggtgttccaggcgctgttgtagcgcgtaatatctttccacggcacaacatgcaacgccagcatcagcgagacggccagcagacccacggcagtggcgttgatgatttttccaccaaaaacccacaatcctaagctaagcagcaccaggccaatcagcgtccactctttgcgggacagacgccccatgttttttaactcgccgccagcccaggccgcgacttccgcactgtgggtcacttcaggtttataaagtacataggagagccacggcgcaacgatcagtaaaataatccctaccggcagaaagctgagaaaccactgcagccagctaatctggacgccagcgatcttgctgacgaactccagacctaatacgttcggggccgcgccagtgacaaacatcgaagagctcaggctggtactgatcaccatcatccacatcaaataaccgccgatgcggcgtgcggaaggatcgtttggaaacgatttaaacagcggcggcaggttcttgatgaccgggaagacagtcccgccggtacgagccgtattggagggagtaaacggcgccagcaaaatatcgataatgacaatcgcatagccgagcgtcagcgtgcgtttacccatgaattttaccagaaacagcgcaatgcggcgccccagcccggtcacttcgtagcccagcgcgaaaataaacgcgccgaaaaccagccagaccgtggtgctggagaaaccggcaagcccccatttcagcgcctgtttactggcgttaaacgccggatcggccagttccgaagcgtcaaatagcaggtaattgctgccgataacgcaaatggttacggcgataaaactgatcgctgtcgccgggatcggctccaggatcataccgacaatcatcgcgacgaaaaccgcaaaatagtgccaggcctgcggcggcataccatctggaacaggaattagcaacatgacgcccatcaccactaatggggccaacaacttccatatattatctttggataaagacataaatgactctccggaaaggatattttctataattgtgttaatgattaacttgcgaaatttgcgctaaaaaccaggtcacgatcagcagatcggcgctaccgcctgggctgagattgcgttcaatgcattgctgatcgaaccggtggagataaacgagatcgtcaggcgtccgtatgccgccctgatgtaataagaccgccgcctgctgctgtaaccagcgcagaccgtccgccccgccgcgcgacgcgacgttggtatcgccgttaagcgacatcagcagcagtaaggtatcaagcagcgccagttccggatcgcgcccctgcgccagcaatgcgcggtagtgcggtaacgcgtggcggatgaccagcggatagcccgcttccgcttcgccgcgcgcgccagttaatcccagttgctgatacagccgctgacctgcggtgagctgtaggttgttctggcgcagttcgcgcgtggtcaggccgcggcaaaaatcggcggcggtagcgcagagtgtttctgcagcgatcggctggcgtagctgatacaggcggccaatggcggcgcacagtaaccccagcgagaaaatgctgcctttatgggtattgacgcccgccgttgcgcgaaacatcgctgcttcacaggccatccccaatggacgcaggcccgccagaactgactctggcggcaggcgcgtgcagctggcgccatattccataaagcgcggcagccagtgtcgaatcgcctccgcgctgcggtgaaaatccgccagcgccatatctttgtgcgcgccgcagtttagtcggtctaccagaccgggttttggcgataaatttacctcggtcagcatggcgcgccaggccaaatcggcccaggcgtcatacagcgactgaggctgaatggaggcgttagtcgggttggcgggaatcggcatcatgcagcagcgcctccatatgaatcagtaaatcagtcagcgcgtgggttttaccccgcgcgcattcagccgcgctttgcccgcacagcagacagcggcgggcgggaagcgcgaaatggcggcgggagagtatttcgccttccgccgtcaggacatcgatatcccacaggcgccccagtggataacgctgttcaagtgcgatggtcgcctgtttgagcgcctgagcgggcgcgtcaatcgctagcagcccttccggcccgctggcggaagccagtgcagcctgctcccggatagtccagccatactcttctgccagcgtgtgcagggcagtcacgccgtgattaaagatccggcgggttaacgcgctgtcttttatcgggcctggcgccaccacggtaaaggagaccagtggagtggcgtggcgcgttagccaggcgcgctgtcttgcttgtctctcatcccggctggcgagcagctcaggaatagaaacgtcgtgacaggtggcgagttcaggaaacaggcgcatggcttattccttcacctgatgcaccacatcgatcactgaaccgtcgcgataacgcacgacagcaatcacgcggtcggtgaattcgatagggcggggctgaccggtaagcagttgcgcgcgttcgcgcagccactcaatcgataccactttcattcccgctgcttgcagtcgttcagccagctccggacgcgccgggttgacggcgataccgtgatcggtgaccagaatgtcgacgctggagcctggtgtgacgcaggtggtgacgttatcaaccagcgttgggatgcgaccgcgcaccagcggcgcgacgatgatggacagcgccgccgcgacggcggtatcgcagtggccgccggacgcgccgcgtagaacgccgtcggagccggtcagcacgttaacattgaagtgggtgtctacttccagcgcgctcagcaccaccacgtccagacggtcgacggaagcacctttagagccccagttggcgtactggttagcgctgatttcgatatggttcgggttgcgggccaaagattgcgcagcgttacgatcgaagctctgcacgtcaagcagtttgcggattaagcccttttcatgcaggtcgaccatggtggcggtgataccgcccagcgcgaaattagccacaatgttgcggctacgcattttgtcttccaggaagcgggtgaccgccagcgatgcgccgccggtgccggtttgcagggagaaaccttcgttgaagtagccggagtgagcaatgacttccgccgcgctgcgggcgatcagcagttcacgcggattagtggtcatgcgggtcgcgccagcgccgattttgtttgcatcaccgacttcttcgatttgcacgatcagatcaacctgatcctgagcgatgcttgccgggttatgcggatacggcagcagttgctccgtcagcatcacgacctgcttcgcgctgtcggcatccaccatcgcgtagcccagtgaaccgcaacaggccttgccggtataaccattagcattaccgaattcatcgcaggagggcacgccaagaaacgcaacatcaatgttgagttcgccgctttgtaccagatgtacacgaccgccgtgggagtgaatctgaaccggctcagccagcaggccgcgagaaatttcttccgccagcgggccgcgcaggcctgacgtgtagatgcggctgaccaccccgttacgaatgtgttcaaccagcggcgcgtggcagtcgctcagcgagctggaggccagggtcagatttttgaagcccatcttcgcgatggtttccatcaccaggttaatcgtcagatcgccgccgcgaaacgcgtggtgaaaagagagcgtcatgccgtcgcgtaaaccggaacggcggatggcctcttccaggctggcgcacagtttgtggtcgcgcggtttttgcgcttgtagatccaattttgccgcactttggtaagcgctcagttcgctttcagcgtgacggctccaggctgctacgcgatcctggcgttgagattcatttttctgcgtcatttttttgccttattcttcgcgaataccggaaagttctgcacgggagagcaccagacgggcgcgttcaatcaccgggctgtcgaccatcttgccgttaagggaaacgacgccgagaccttcgcgggcggcggcttctgcggcttcaacgaccagacgcgcatgggcgacctctttacgcgtcggcgcataaaggttgtgcagcagttcgatctggcgggggttgatcagtgacttaccgtcaaagcccaactgtttaatgtgggcggcttcttgcaggaaaccggcttcgttgttggcgtcggaatagacggtatcgaaggcctgaatgccggcggaacgcgcggcctgcaaaatggcgcagcgggcgaacagcagttcggtgccttccggagagcgttcggtgcgcaggttgcgaacatagtcttccgcgcccagcgcaatcccgatcaaccgttcagaggcgtgggcgatttctaccgcgcgggtaatacccagcggcgattccacggcagctaacaggccggtactgcccggttcgcgaccgcaggcgttttcaatgcgcagaatttcgttttcgatatcaatgacgtcctgcgcggtgtcggttttcggtaaacgcaccacgtccgcgccgccgcgcacgaccgcttccagatcgttgacgccccattcggaatccagcgcattcacgcggacaatggtttcgacgtcacggtaaagcgggtgttgcagcgcgtgatataccagacggcgcgccgcatctttttcgcgtaatgcaacggagtcttccaggtcgaacatcagcgcgtcggccgggtagataaacgaattgctcaccatcgccgcgttggcgcccggtacgaataacatactgcggcgggtgcgggttttacgttgttgcagagaggcggaaatcattggcgatcctcccagggcagagcggcaataccgctggcgcgcgccagtagcgtttccagtcgggcgcgcaaaatgcagtccagagcgcctttatcatcgacgttcagttgtacgccgcgcacgtcgtagcgagaaagcacctccaggatggtggcgcgaatggcctcgccaaactgtttttcaacgctactgttgatttgcaggtcaatatcctgcgtatcgagcggcgcaatgcgtatcatcacatcgccggactcaagcgtgcctgcgacggctagctggtttattttcatttttcacctgttgctaagacgggggacttttgacgggctgccgcgctgcccggatggcgttcgaccatgccctgcaaatagcgcagggtggcgtcgggaaccagcggcgcgatagccgtgagatcgtgtttaaccagcagcttgcgtacccaggaggcggatatcggcgtctcctggaagcaaagccgctctatttccaccagcgtaatgggtggggcgggaagcgttggcgtctccagccagaaacgcatatcaaggttgtactgggcggtaacggtgcaaaacggttccgtaccgacaaagcggtgtgtgatgccaagcgcgggcgccagatactggcgaaaaatcttcaggtcgatttcggtataacagtgattaatgacgctctgctctttaatgaaatagcaggggaacgtcgcccgagaaataatgtattcggagccgcggtgaacggttaagcgcgggatatcggtggtccctttaagaaccagatcgagtcggtcttcatagggaaagcgtgatgtatcttctttgaccaggaacagatgcagccagtcgcactgtgccgccgcctgttggatcagatagcgatggccgtgcgtgaaaggattggcgttcatcacaatacagccaattttctttccctcatgacgcaatgtcgccagcgattccgcataccgtttcaaccgggtcgcgctattttccattaagaccattacgccagggacgctggctatcgtcgaaaagctgcactgtttaaacagcgcttcgtattccgttttggtataaataaaaagatgggtgcagtgccgctcccaggcgagattaatcaattccgtcgccagcgttaacgctaagccttcgccgcgtactgattcgctaatggccacgcatttaatgatatttccggcaataccgccgcaggcaataagacggtcatcacggctgacggtaataaacacttctacagtggtatcgacgcttaaatcattctctttgagaaagtgagcgatctccgccatttttttattttcagagcgttttacccgagtgaatacattattgccaaacatagtaagaaatatcctggtgatatgcttgttgccacttttctgtatatgttgcgctgtgttgcaacttgataactttttcttttcagtcagagtgggagtttttttatgacgagttatttatttttctctctgacgtatacatcgtaaggagtattttggtggtaaattttgatttatttcacaaagcgttagatggtttttaagtgttttatggttttaagttttttaattaatttaatcgccattccggcggtgggttttagttgtttaattgatttaatgtggggaatctgtaacgattggtttttatatgcatcaagatgctgaaaacatttttattacatttgcgataaatctgaagaaaaatgcccataaggaaccttaatgtcctatcagaaaaataaaaagctgtttcctttttttcggcaactcgcgtttccgttacgtatttttctgctcattctggtggtttctgttttcatcgtggcagcgttagcacaatatttgtctgccagtttcgaagattatctggcgtcccatgttcgtgatatggcgatgaatcaggcaaaaattattgcttctaacgacagcattatcgctgccgtaaaaaaccgggactataaacgcctggcgataattgcgaataaactgcagcgcgggacggattttgactatgtggtgataggcgatcgccactcgatccggctttaccatccgaatccggaaaaaatcggctatcccatgcagtttacgaaacccggcgcgctggaaagaggagaaagttatttcattaccggtaagggctcaatagggatggcgatgcgcgccaaaacgcctatctttgacaacaaaggcaacgtgatcggcgttgtttcaattggctatctggtcagtaaaatcgactcctggcggctggacttcttattaccgatggcgggggtttttgtcctgttgctggtggtattaatgctgctttcctggtttttcgccgcgcatatccgccgacaaatgctgggcatggagccgaaacagattgcgcgcgtggtacgccagcaggaggcgttgtttagctcggtttatgaagggctgatcgccgttgatccggagggacatattaccgcgattaaccgcagtgcgagaaaaatgttggggctgccgtcgccggggcgtcagtggctgggcaagctgatcgcggaagtcgtcaatccggcagacttttttacctgccagatcgcagaaagacgccaggacgtgatggccaacttcaatggcctgagcgtcatcgccaatcgtgaggctatccgttccggcgaggagctgctgggcgctattattagttttcgcagcaaagatgaaatcgcgacgttgaacgcgcagctaacccagattaaacagtatgttgagagcctgcgcacgctacgccatgagcacctgaactggatgtcgactctgaacggcctgctgcaaatgaaagagtatgatcgggtcagagagatggtgcagggcgaatcgcaggcgcagcagcaacttattgatagtttacgcggcgccttcgccgatcgtcaggtggccggtttgctgtttggcaaagttcagcgcgcgcgtgaactggggctcaagatggtgattgttcccggcagccagctacatcaactgccggaggggctggatagcacggagttcgccgccatcgtcgggaatctgctggataacgcgtttgaggcgagtttgcgtacacaggaaggcgacaataccatcgaacttttcctgagcgacgagggcgacgaggtggtgatagaggtcgccgaccagggctgcggcgttcctgaagcgctgcgggaaaaaatttttgaacagggcgtaagtacccgaaccgacgaacccggtgagcatggtatcgggttatatctgattgcaagttatgtggggcgctgtggcggggtcattacgctggaagacaatgatccttgtggcaccttattttctttattccttccgaaagtgaaaaaaaacgatgacagaaccattaaccctattgatcgttgaggatgaaacgctgctggcggagatgcacgcagaatatatccgccatattcctggctttaaccagatatggctggcgggcaatctggcgcaggcgagaatgatgattgaccggttcaaacctggattaattctgttagataattatctgccggatgggaaggggattacgctgctgcatgaattaatgcagtcgcgctatcccggcggcgtcgtgtttacgaccgccgccagtgacatggagacggtagcggaagcggtacgtagcggtgcgtttgattatctggtcaaacctattgcttatgagcgtttggggcagacgctgacccgctatcaacagcgcagacgtatgctggcgagcgcggatagcgcaagtcagaagcagatagatgaaatgttcaacgcctatgcgcgcggcgaaccgaaaggggatttgccgaccggtattgatgccttaacccttaatgcggtgatgaagctgtttgccgatccaaccgtacgccatacggctgaaacggtcgcgcaggccttaacgataagccgcaccacatcccgacgctacctggaatattgcgcgagtcggcacctgattgtcgcagagattattcatggcaaagtgggcaggccgcagcgtatttaccacggcggctaagcctggtttaagatgccggggcgatgttttccctcgccccggcttacggtctatcagccgccagtaacggcggaagaggcgcctggcaccataatttccgtggcgataatgacgatcaacagaccgacgatgaccggaacggacgtgcgcttcaccacttcaaacggtgatattttagccatcccggcgacagcgaccacgacgccggagaccggcgaaatcgtgcgccccaggtttgaggcttgcagcattgggatagataaataggctgggttgatgccggaggagtgcgccagtttagggatcatctcaacaaaggcgtaaaaaggcgcattgcctgaaccggtggtcatcgcggccagcatggttaaaatcactaataccagcatcagaataatgctggcggaaccaaaagaagtggcaatcgagatcaggctttggataaagccaatggtgctcagcccctgggcgaaaacgcccgccgcgaccagcagcatcacgacgccggcaaacgcatccgccatgccgcgataagccacttccaggccggaaaacacattttgcgtgttgaagccgcgcacgaattccagcacggcggccagcagcatacagatcaccagaatggtaataatgtgcaactgcggcccccatttaccgtcaaaaatcagtacgccgataatgggcgtgaacggcaaaagggcataaaacgccggggccgtggtggtaatctccgccacgtccagcatctcatgtgaaatgttctcttttttatccagatagcgttgccagaaaaaatgcgcaatcgccataccgataatggcggcgatggaaatcggcagcgtggttttgaacgcgaaatcgattaatggcatctccgccgcttttgcggctaaaaccacatcgccagacgttggcgagaggatgatggcggccggagaggcgcaaatagccgccgccgcgccgcggctaatgccgacgttgaccatcaccgggaagagagtagccatgagcagtacgccaagccccgtcgcggaagagacggccagcgacatcaggcaggcgacaaaataggcggcaatcatcaacaggtagggcgagtttatgtactgtaaaggtttcgacgccagcttcacgaccatatcattcgcgccgatatgcgtcatataggcggcaaagccgcatagcatcatgatcatcatgccaagatcgccgccgcgactcataagcaaaattttgatgtattcaacaatatctgttgcggtatagccggtactggtttcgctggcaggtaataccttatgccccatcagcgcgctgataataagcagaaccagaccgccgacaaataaaacgccagtggcggaatatcccttaatgatgtagcgtgctacacccacaataacgacgactccgataaggagctctataactgttagcattgtttcccctgtcttatcgacacccagagtaaaaataagaaccacaaaagtggtataaaaatgtaccgaataaaggatggcgccttactgattaaaatcacggcgcggttattttttcatgtcatcactaaagatgaaatatgtttatacgaattttctgtagtgctataagtattaatttattgttattttattgttttatttgttgtgctttgttttgtgttttttgtgaaagcttattaaggagcgcgtgacggttctgagtgctaaatcaaacgccgttaacccgatactctctcagattattctctgtttatagtttgttaagattttattcaggttaatgttgttattatcacagtcgaatttttgaacggtatgtatgttgcgatgatcatcagaaagtattttcttattattgctctccttgttatgccatggctggctattccttcagtctctgcggcggataaagggtggtttaacacgtttaccgataacgtcgcagaaacgtggcgacagcctgagcattatgatttgtatgtccccgccattacctggcatgcgcgctttgcctacgataaagagaaaacggatcgctataacgagcggccgtggggcgttggttttggtcagtcgcgctgggacgataaaggcaactggcatggcctctatatgatggcctttaaagattcatttaacaaatgggaacccataggcggttatggctgggaaaaaacctggcgaccgctggaagacgataattttcgtctgggactgggctttaccgcaggcgttaccgcgcgcgacaactggaattatattcccatccctgtgctgttgcctttagcatcgataggctatggtcccgctacctttcagatgacctacattccgggttcgtataacaacggaaacgtctattttgcctggatgcgtttccagttttgacggagaagggcattgttctgttgtgaattaaaaagccttaaaaaacaataagtagatagggttagttaaaaattaacgcgatatttatcactttttcgcaaagttcgactggacaaaatgcatcacaattgttgtactggtatccgacacagcatttgtgtctatttttcatgtaaaggtaattttgatgtctaagattaaaggtaacgttaagtggtttaatgaatccaaaggattcggtttcattactccggaagatggcagcaaagacgtgttcgtacacttctctgcaatccagaccaatggttttaaaactctggctgaaggtcagcgcgtagagttcgaaatcactaacggtgccaaaggcccttccgctgcaaacgtaactgctctgtaagcatacgtccgacagcaagatttcaaaacccgccctttcggcgggttttttttgcgcttaacgcgccgctgcggcggaaaatagccagaatgccagcgccgtcatggcaaacgaacccaacaggttaatcagcacattcagcagcgcccagccaaagcgcccctcttgcagcaagaataccacttcggcagaaaaagtagaaaaggtcgtcaggccgccgcaaaagccggtcgtaatgagcactttccacatcggatcgatatgtgtcatgcggttaaaccaggcgaaccccatgccgataataaacgcgccaagcaaatttgctgttagcgtaccgatgggaatcgcctgatgaagcggattaaaacgcatactgagcatccaccgggctacgctccccgttccaccgccaataaaaactgctaaaagaagctgtaacactgccgaatcctttatttaattgctatacaagaggagtgtaacgccgaacacgcataattggcgagtcctgacagaggtgtgggaggggatatgttcgttgcagccgggcagtttgtggtgagttctgtatgggaagagaatgcgcaagtttgcgtttcgttaatggctcaggcggcgggccgcggcgtatcgcttctggtgttgcctgaggggatattagcgcgaaatgacatcgaccttgacctgccgattcgcgccgcgcagccgctggatggcgcgtttatgacgcggcttctggaagaaagcgctcataataatatgacgacgatattcactatccttgtcccgtcaacgcctggacgggcggttaatatgctggtggcgctacgggcgggtcacattgtcgcgcgttacgcgaagctgcatctctatgatgcgttttcgatgcaagaatcccaaagtattgatgccggaaccgttatcgcgcctgtgctggacgtggagggggttaaggtggggcttatgacctgttatgacctgcgctttcctgacatggcgttagcgctggctttacagggggctgacgtattggcgctgccgacgggctgggttcgcggcccgttgaaagagcagcagtggtcgacgctgctggcggcgagagcgctggataccacctgctatatgattgcggccggggagtgtggtaatcgtaatattggtcaaagtcgtattatcgatccgttgggggtaacgatagccgcggcagccgatcgtccggcgctgatcgtcgcggaaatattcagagaacgaatagatcaggtgcgggagcaacttcctcttttgcagcaacgacgatttgcgccaccgcaattattatgatgtttttttacgcaaagcttgattcaccttgttacagattgctattgtgtgcgcgcgtcgaaagaccgttaatattctcaggttaatccggcgcgttacgcagcctgtttttagtgaagaaggtatctatgggtgagattagtattaccaaactgctggtggttgccgcactggttgttctgctgtttggtaccaagaagttacgtacgctgggcggagacctgggcacggcgattaaaggattcaagaaagcaatgaacgatgaagacgcgggcgttaagaaagacgtcgacggtagcgttcaggctgaaaaactctcgcacaaagagtaatagcgcgatgcgcttgctccgcagagtaaaaaaaccggcgagttgccggttttttttgcctgaaatgtaagcgtctattacacgatcatttcacttccatgcctttggcctggagatcagcatggtacgaagaacgtacaaaggggccacaggcggcatgggtaaagcccatcgccagagcttccgctttcatctcgtcaaactcttccgggctgacataacgctgtaccggcaggtgatggcggcttggctgtagatactgaccaagcgtcagcatggtaacgccgtgacggcgtaagtcgcgcataacctcaatgatttccgcattggtttcgcctaagcccaccatcagacccgattttgtcggaatttccgggtgcgcttctttgaagcgttccagtaatttcagcgaccagttgtaatcggcgcccggacgaacctggcggtaaatacgcggcacgttttccaggttgtggttaaacacatccggcggcgtcgcgttaaggatatccagcgcgcgatccatacgtccacggaagtctggcaccagcgtctctatttttatctccgggcttttggcacggatggcagtgatgcagtcagcaaaatgctgggcaccgccgtcacgcagatcgtcacggtcgacagaggtgatgaccacatagcgtagcgccatgtcggcgatcgtttgcgccagtttctgcggctcttccgcatccggcgcaacggggcggccatgggcgacatcacagaacggacagcggcgagtgcaaatggcgccaaggatcataaacgtagcggtaccgtggttgaaacattcagccaggtttgggcaagacgcttcctcgcagacagaatgcaggccatttttgcgcattgcggctttgatgccctggatacgggtagaatccgccggaagttttattttcatccattccggtttacgtagtagagcgtcgcgctctgtgaccacatttttaaccgggataagagccatcttatcggcatcgcggtattttacaccgcgttccatcacaatgggtttactcatagcgtgcgtgttccagttgcgaataacgaaggaaagcgtttcaattcaagggaaagttgtatttatcaactatttttgaatttgtgacacgcagtatatcattgataagggccataaagcagcctgacagcccggcaaaatgtaaaatagttgttgttttgtgctgtttgcccatatcttccgtgacctgaatgcaacatttttgtcagaacgcctcacggatgatatcaatgacgttctccagcaccggatcgcgcagactcagtttattgtaatgcagcgagaactcgacctgttcactattcaccggcgcgtagggaaggcgttcaagcggccagcaacggctaaataagtcgtagaagcgggtgggcatcagtcccagcagatcgctgctggcgatcagcgaggcaatggtaaaaatattgtagctgctaaaactgatttgctgatcgggaaatgtctcctgcagtcgctggcgcagcagggaaagatgttgtccctccagcatcagaaaggtgtgatccgcgctgttcagtctctcttcagtaatggcgttcgccagacacgggtgatgctggcggcagacaatctcaagcgtatcgctaaacaggacgtgatgctggatgctccggttgttatagctatgggtattgataatgagatcggtctgaaactgactaagctggctttcggcatcgtctaccggaatgttgcgcagcaaaagctgaggataacgcggcctgatggcctggtaaataaccggcatcactagcgcgccgaccgaaggcgtcgtgccaattgtaatggtgcgttgcttatcatagctgcccgtaagatccagggcgccaagaatagattccagcccctggctgatgtattcgtgcagatgcgtagcatacgtcgtgggcgttacgccctggcctttgcgaataaacagcggatcgggaaatatagtccgtaatttttgaatggactggctgatggctgacggcgtcaggttaagaattttcgctgcattgacgatccctttatggacatatacggcctcgaaaatcgtcaacagattgaggtcaatatttctcagtgttctgaaaatttgcggtttgtcttgtaggtgttgatcggccggttgtctttctgcctgattattatcactcacgctctggctccgaattcattcgtattatgaataatagatgaaatagtatattttgcatttatgagttggttttaaaattactcttatgaatgtatttttagtcatttcaataagataagtaacagcaaggccgggattttgttcacggaaaattcctcatcatgaggactgaagaggccatgccgcctggcggctacagcagggatataacgaaaatatagaaagcggggggagaagtaaagcattcaaatcatatatgattaatgacccataaatttcttgggccattatattttacgcattaagcagcaatatattcatacggtggattatttagcagagctaaaatattcgccagcaagcggggcgcaatattatccgtggtagcgtcttccttccactgcgttattttagccatttccatgccggcataaccacacgggttgatacgcaggaaaggagaaagatccatgttaacgtttagcgctaaaccgtggaatgagcagccgcgacggatacgtaaacccagcgagcagattttcttttcacccacgtagacgcccggcgcatcggcgcgcggatgcgcctcaataccaatttcagccagcgtattcaccacggtctgttcaagtagggtgactaaatcacgcacgcccagtttacgtcgtttcaggttaagtaaaacgtacattacctgttggcccggaccatgataggtcacctgtcctccacgatcgctctgcacaacgggaatatcgccaggcatcaatatatgttccgctttaccggcctggccctgggtaaacaccgggtaatgctcaaccaaccagatttcatcatggctgttttcatcgcgcatatcggtaaagttatgcatggcctgagagatagcttcatagggctgaaggccgagctggcggacaaggattttatcctgatacaaaacggcatctccgtagagaatgaaaaaagagaggaaagtatatcacagcgggggaggcggggagttacccggataagaccgggtaaccgtctggatgtattacaataccattcgcacgatatcaatattgcccagttcttcgtacagcgtttcaacctgttcaatatgggtggcattaatggtgatagagaccgagtggtagttgcctttgctgctcggttttaccgtcggagagtaatcaccaggcgcatggcgctgtaccacttcaaccacctgatcaaccagctcaggtaacgcctgccccattactttgtaagtaaatggcgtagggaattcaagcagttcgttaagtttggttttcatgtcagctccggcattacgtaaaaaaataacaactcccgccacagggcgggagttttactgatgcatagtatatggggacgaaaatcacactttcaagcgttcaatttttatccaaaccagtgatggaacattaatttaatgtaatcaatgattttaccgaagaagttcccttccgggatctcttgcagtacgaccagcggacgctgctcgatggttttaccgtccagctggaagttgatagtgccaaccacctggtttttctgcagcggcgcgtgcagttctgcggtattcagtacatagctcgctttcaaatctttcatgcgaccgcgagggatcgtcaggtaaacgtctttatcaacgcccagcgaggcgcgatcggtattaccaaaccaggcgggttcagaggcgaactctttaccagccttcagcggattaacggtttcaaagaaacggaagccccacgtcagcagttttttgctttctgtttcacggcctttataggtccgtccgcccatcacggcggaaatcaatcgcatctgaccttcggttgcggaagcgaccagattatagcccgctttgctggtatggccggttttgatgccgtccacattcaggctgttatcccacagcagaccgttacggtttagctggcgaatgccgttaaaggtgaactctttttctttataaacggcatattcgttcggcacatcgcgaattaacgcctgaccaatcagcgccatatcgcgagctgaactgtattgtccgtcggcgtccaggccgtgtacggtctggaagtgggtatttttcagccccaacgcgttcacatagctgttcatcagcccgacgaaagcatcctggctaccggcggcgaaatcagccatcgccacacaggcgtcattgccggattgcagattgatgccgcgtatcaactgagagaccggtacctgcattcccggcttgaggaacatcagcgaggaacctttaaataccggattgccggtggcccaggcgtcattaccgacggtaaccaggtcggtttctttaaatttacccgctttcattgcctgtccgatgacgtaactggtcatcatcttcgtcagactagccgggtcgcgacgttcgtcggcgttttgttccgccagaactttgccggagttgtagtcgatcaggatgtaggattccgcatcgatctgcggaacgcccgggatcatagttttgatattcaggtcatcggcatgtgcggttgagataaacgcggcacaaagcgccgtggtgagcgccatgcgctgcataaaacgagcggaaaaagtggtcttcatggtctgaactacgacgtccgtgatgaaattaaaaaaaagagccctactatagcaaaagcataactggcaggcatctgactttccgcgtgactttgttaatgtcatttacagaaattgacagtacagatacctgcgatcggttactgcgcgctggcgataaaggactgtaattgtgcttctgtttgcaaacgttgctgtaacgcgctggcttcggctttactggcaaaaggccccagttgaatacgccagaccgcgccgttttgtattacgcgccctggtacgctgaactgctggcttaaacgctgttggtactgctgcgcgcgcgtttgatcgctgacggcgccgacctggacgacgaaacgaccgctcgccgcggcggctggcgcactcaccggggcagataccggggccgcggcagcaggcgcgcttaccggcgtcgcagtcgctggagccgtcaccggcgcggaaaccggcgctgtctgtggtgtcggcgtcggttcattactctccagcacgccaggcgccagcgtagtcggcgcgccgaggaagccgctactgctcaccggcgcaccggtggtatcgtcacttttcaacgtggaattactgaccggaagaacgtcgccttgcggttgcgcaggcgctgaagaggcgcttcccattccgccgcttaaatcagggcgcgggggcagagcgtaggtctgtttcgccaccgtcgtacaggccatccccgggccggagagcgaaccatccggcgccacgataatagggtcaatccgtactttagtattattcgaggtattcagacgatccgccgccgcgcgggacagggagatgacccgatcggtgccataggggccgcgatcgttaatacgcacgacgatcatgcgaccgttggccaggttggtgattcgcgcatagctggggataggcagtgtcggatgggcggcggtaagctgcatcggatcgaacatctccccggaggcggttaaattactgccgggttccgcatcataaatagcggccaggccagcctggctaaagcgggacgggtcctgaacgattttataacttttaccgtcacgttgataatcctggtttgcggtcggattcagaggttcataacgcggttccgctccgctgatttccacagtcggaccattacataccgcaggttgcggcgcgacggtggtttgctgctgaccgccgtcattagtacatgccgcgagtagtactatccctgccgcgacgcagattacaggcaactgcttacgcattgcgcaccccttatacgcttttcgacaacatttttctgtgggtgtggatcgacatcacaatcccgaacccggccatcagcacaatcagtgcggagcccccgtagctgaccaggggtaaaggtactccaaccacaggcagaataccgctcaccataccaatatttacgaagacataaacgaataatattaacattaatccgccagccatcacgcgaccaaatgtagtttgcgctctggcggcaatccacagaccgcgcattattagcaaaatatagagcgcgagcagaatcaggatgcccaccagaccgagctcttccgccagtaccgcgaaaataaagtcggtatggcgttcgggtaaaaactccagctgcgactgggtgccgtggagccagcctttaccgcgcaggccgcctgagccaatggcgattttagactgaataatatgatagcccgcgcccagcggatcggtctccggatcaaggagcatcatgacgcgctggcgttggtaatcgtgcatcaggaaaaaccacaaaataggaataaacgcagcgatcaatacaatggcgaccccaattaagcgccagctcaggccagacaaaaataggacaaagagaccggaaagggcgaccagaatagacgtccccaggtccggctgggcggcgaccagcagggtaggcataaagattaataccagggcgatggcggtatttttcagcgagggcgggcagacgtcacggttaataaagcgggcgaccatcagcggcacggcgattttggctatttccgaaggctgaaagcgaacgattcccagatcgagccagcgctgcgcgcctttggatattgcgccgaaggcatcaacggcgaccagcaaaatgatacaaatgatataaagatagggcgcccagccttcatacacgcgcggcgggatctgcgccatcaccaccatgaccaccagccccatcgcaatctgaccgattttacgctccatcatgccgatgtcctggccgctggcgctccagatgaccaacgcgctgtaaaccagtaacgccagcagaatgagtagcatcgtgggatcgatatgaattttatcccagaaggtttttttgttcggattatccgtcatgattattggtcctccgccgctgcaaccaccgggttttccgcaggcaaatgggtgttgttgtcgcccagcatgatgtgatcaaggatttggcgcatgattgtgcctactgccgggcctgcaccgccgttttcaaggatgatcgcgacggcgacctggggattgttatacggcgcaaaggcggtcattaatttatggtcgcgcaggcgctcggcgattttatgcgcattgtacgtttcgttggccttcaggccaaagacctgcgcggtgcccgacttcgccgcgattttatagggcgcgctggcaaaatatttatgcgctgtgccgttagggcggttggcgacgccatacatgccatctttcgcaatttcccagtagccggagtgaatatcgcccaccggcggctcatgcggctgtacccacggcacctgtttaccgttttccgcggtgctcattaacaggtgcgggactttaactacaccgtcgttaataaggatcatcagcgccttactcatctgaatcggcgtcgctgtccagtaaccctggccgatgcccaccggaatcgtatcgccctgataccacggttttttaaagcgtttctgtttccactcgcgggtcggcatattaccagagcgctcttctgcgagatcaattccggtgtagtgaccatagccgaacttacccatccattctgacaggcgatcgatccccatatcataggcaacctgatagaagaaggtatccgccgactcttcaagggatttggtgatattcagatgcccgtggccccattttttccagtcgcgataacgtttctcagaccccggcaactgccaccagccagggtcgaaaagactggtgttacgggtgatgacgccagcgcttaacgccgatacggcgacgtaaggcttaacggtagaagcaggtgggtagacaccctgagtcgcgcggttcactaatggcgtgttcgggtcgttaagaagcccggaataatctttgctggagatgccatccacgaaaaggttagggtcgtaacttggcatggagaccagcgatagcacgccgccggtacgcggatcggtgacaatcaccgccgcgcgactgcctgccagcagcgtttcaatatactgctggagcttgagatccagcgtcaggtagatatcgtgtccggcctgcggcggcacctctttgagttggcgaataacgcgaccgcggttgttgacttcaacctcttcataaccggtttgcccatgcagaatatcttcatagtagcgctcaatgcccagcttgccgatgtcatgggtggcggcgtagttcgccagtttgttttctctgtcgagacgctcgacgtctttatcattgattttcgatacgtagccgataacgtgggtcagcgccgatccgtatggataatagcggcgtttatagcctttgacttcgacgcccggaaaacggtactggttgacggcaaagcgcgcgacctgaacttccgtcaggtttgttttcaccggaatagaagtaaagcgatgggatcgggcgcgctcttttttaaaggcggcgatatcgtcgtcgtttaaatcgaccacactgcgtagcgcatccagcgtttgctgaacgttatccaccttttccggcatcatttcaatctgatagatagtgcggttcagcgcaaggggaatgccgttacggtcgtagattatcccgcggcttggcgcaattggcaccagcttgatacggttttcgttcgagcgggtctggtaatcggtaaaacgaaggatttgcagattatacaaattggcgatcagtacgccggtcagcagcaaaatacccaaaaaggcgaccagcgcccgacgcacaaacagtgcggactcagccgtatagtcacgaaaagaattttgtcgtttcatccgctgcttaatcttctcaagacttcacgatcactcacggtgataagggtggttggttgtgatgctccacgcccggtacaaactctccgcaaccagaactcgaaccagcgggtgagggagcgttaacgccgagagcgaccagctctgttccgctgccgctttgcaggcgggagataatccttccgggccgccaatcagcaaactgacgtcgcgcccgtcctgtttccagcgctccagctcattggctaactgcggcgtatcccacggcttgcctggaatatccagggtaacaatgcgattcttaccggcggcggccagcatctgctcgccctctttgtcgagaatgcgtttgatatccgcgttcttgccgcgtttgcccgcagggatttcgatcagctcaaagggcatatctttcggaaaacgacgcagatattccgtaaatcccgtttgaacccagtcgggcatcttcgtgccgacagcgacaagttgcagcttcacgcattaactccagagtttttccagttcatacaggcggcgactttcttcctgcatgacatgcacaatcacatcgcccaaatcgacgacaatccagtcagccgcattttcgccttcgacgcccaatggcagcataccggccgcgcgcgacgactgcaccacgtggtcggcaatagacataacgtgacggctggaggtgccggtacaaataatcatacagtcggtgatactggatttaccctgaacatctaaggcgatgatgtcctgacctttcaggtcatcaattttgtcgataacaaaatcctggagtgctttaccctgcaagttttccccctgggtgaataattgcgttataacgatagaaaaaaggccaacaggctggaccggtaaggcgttgcgagttaacgctaaccttccggcgggacgccgtgtagtatacctgaatcagcggcgataccgggacttatgtcgccggatcggcgtttaaaaccagattatcatcccatcccacgtcacagaaagcatcgccatttttgtaaaacaatttctgcaaagctctgcaaggtgaaaaaagcctggctgcggagaataacagcctgtcgggggctgtcaatgggcgaaaccgctgcggcgagaaaaaacggaaaattcatcactcaggccgccagacggcacgactatttaatactttcagggtggcgaacccttcgcatatgtcgattgcgctccagcatccctgttctacccggaaatgccatagcgaggcggcgggcattgcgagcagacgggcaatcaacaggctgagtacgccctgatggctgacgatcagcaggttctggcaatcgctaaacgcgtcgagtcgcgagataaagcgctctacgcgccgggtaaaagcctgaaaaccctcgccattggtcggaaccgcattctgccagtccgtacaccaggcggcatagctttcggcatcttcatgggtgaggtcgcggtgatggcgcatttcccagtcgccaaagtacatctcattaagctcaggtaagatgtgttgcggcacatcccggccctccagtacgagccgggcggtatggcgcgcgcgctccagctcgctgcataacacccggtcaaatggcgcgtggcgcaataaagtatgtagcgttttcgcctggccaatccctttttccgttaacggcgtgggagcatgtccgctatacaacccggcgacattggcctcggtttcgccatgacgcaccagccacaatcgcatggtattcctcatgaggttaaatgcgcaaaacatgataatgcccctgattgcgcaacgtttttttcactaaaatagcgttttttggccggaggcataatggcgttattcaacagcgcgcatggcggtaatattcgggaagccgcgacggtgttgggcatctcgcctgaccagttactggattttagcgcaaacattaatccgctgggtatgcctgtcagcgtgaaacgcgcgcttatcgacaatctggactgcattgagcgctacccggacgccgattattttcatttgcaccaggcgctggcgcgtcatcatcaggtgccggcatcgtggatactggcgggaaatggcgagacggagtcaatctttaccgtggcgagcggtcttaaaccgcgtcgtgcaatgattgtcacgccaggtttcgcggagtatggccgggcgctggcgcaaagtggctgtgaaattcgtcgctggtctctacgcgaagcggatggctggcagcttaccgatgccattcttgaggcgttgacgcccgatctggactgcctgtttctgtgtacgcccaataatcctaccggcctgctgccggagcggcagttattacaggccattgccgatcgctgcaaatcgctgaacattaacctgatcctggatgaagcgtttatcgattttattccgcatgaggcgggctttattcctgctcttaaagataatccgcatatctgggtgctgcgttcgctgaccaaattttatgccattcccggcctgcggttgggatatctcgtcaatagcgatgacgcggcggtagcgcggatgcgtcgccaacaaatgccgtggtcgattaacgcgctggcggcgcttgccggtgaggtagcgttacaggatagcgcctggcaacaggcgacctggcattggttacgggaggagggcgcccggttttatcaggcgctttgtcagctccccctgctgacggtttatcccgggcgggcaaactatctgttgttacgctgtgagcgagaggatattgatctgcagcgacggttgctgacgcagcggattttaatccgtagctgcgctaactacccggggctggacagccgctattatcgtgtggcgatacgcagcgctgcgcaaaacgagcgtctgctggcggcgctgcgcaatgtgcttaccggtatagcccctgctgattgatgtagttcagcacgttttccggcaacagatcgtcgcaggattcgcctttttccagccgttcgcggatgagggttgcggagatattaagccagggcgtttccgccaggtaaattttaccggctggcaactggtgcagatcgtccggcgtatgggtcagatgctgttccagccactgctggtgttgcgcctgcgtcatttcaaggggatagcccggacgacgacaaacgatcaggtgagtgttatcaaggatggtgtcgtaatcatgccaggtggggaagttaagtagcgagtcctggccgataataaacgccagcggcgcttcgggcccctgttcttcgcgccatgctttcagcgtttgcgcagtgtaagagggcgcgtttcgctgtagctcgcgttcatccagcgtaaaaagcggcttatcgtcgatagccagctccagcatatatttacgctgcgcgctggaggcttccggctgggggcgatgcggcggcacattgttaggcataataatcacccgcgataagccgatcagattcgccagcgtttcaacaggtttaagatgtccataatgcaccggatcaaaggtgccgccgaataaagcctgtaacgatttcatatcacccatcaataaatacgtctgccagcgccttatggcagagcaggagcgacagcccttcaaggtctgcccataccgactgaccataatcctgtttgagcgtaatttctgtacgcgtcagtaactgcacggcctggcgaagctgtgcaggatggagacgcagcaacgcgtcgccgatcatggggcgacggttttgccagacccggtgtttatcaaacagcgcgcgtaacggcgtatgcgcggactgacgtttgagatttaccagtagcagcagctctcgctggagggtgcgcagcagaataaccggttcgctgccttcaaggcgtagctgttgcaggatatgcagcgcgcgtttgcttttccccatcagtaacgcatccacccagtggaaaggggtaaagtgggtggcgtcattgacggcctgctccacgcgaggaagcgttaacttaccgtcaggccaaagcagcgacagccgttccagcgcctgcgccagcgccaacagattgccctcatagcaatagcacagcagttggttcgcggcgtcatccagttgcaaattctgtgctttcgctctggcggccacccagcggggaagctgcgcctgctccggcgtctgacaactgacctgaacgctacggtctgccagcgcggtataccaggcggcgttttcctgcgctttggtgagcttgtttccgcgtactattaataacaggtcgtcatgcagcagctcgctcagggtggcgagttgctcattcattgccgcgttaggcccgttttccggcagttgcagcaccagcgtttgacggctggcgaacaggctcatcgcctggcagagtgagaaaagcgatccccagtcggtactgggatcgagagtaaaagcgtggtgctcttcgaagccttgcgacgcagccgccagacgaatagcgtcctgactttcctgcagcagcagcggatcgttgcccaatagcagatatgccgcgcgcagcccttcgttgagctgcgcgcggagttgttcaggatacaacctgatcattagttactcagcgtagtggagacgcgtgctggcgtagaggcgggcgccgccgtctcattgtcggcggtagcctcctctttcgtcgcctgaatatccgccgcgcggacgctggtcagcttacgaatcagctgttcagcggctttgtcgtacatctcctgaacgatcatggcctgctcgttatccttcgccaacgccatctgcgggttatcgaagaacgaacggtacactttcgtgctgataggatagatgtcatggcccggaatcaataccgaggcattgacggtcatcaccatctgatattccgccgtctggccgtcctggaacactgacgccgtatcctgcgaaatagtcaccgttccaagccgcagagacggaacgtctttgcgcgttgtgtctttatcaagcaagtttacgttattcagccgtaactgattacgtaccgcacgacttagcggaccgttcggatcgccggaatcgaggatcatcgttttcattgaagccggaacctgcgtagtgctacgcagatgccagccgcatccggcggtgaccagcacagccagagataacaacagtgttaccagatatcgcacgcttcctcccgcgcttagccaacaaccagattgaggagtttacccggaacgtaaatcactttacgcacggtaacgccatcaagatattttgccaccagatgttcctggcctgcacgttcacgcacctgttcttcggtggcatccaccgcaacggtgatcttaccgcgaactttaccgttaacctgcacgacaaccagcgtggtgttttccaccattgcctgctcgtcggcaaccggccacggcgcgttgtcgatatcaccttcgccgcccagttcctgccacaaggtaaagcagacgtgcggggtgaacgggttaagcatacgcacgacggcctgcagcgcttcctgaagcagtgcgcggtcttgttcgccttcctgcggggctttcgccagtttgttcatcaactccatgatcgccgcaatggcggtgttgaacgtctgacggcggccgatatcatcggtcactttggcaatggttttatgcacatcgcgacgcagcgctttttgatcttcgctcagcgcatcgacgttcagcgccgcgacaggacctttagcggtgtgttcgtaaaccagcttccagacgcgtttaataaagcggtttgcgccttctacgccggactcctgccattccagagtcatatccgccggagaagcgaacatcataaacaggcgtaccgtgtccgcgccataacgttcaaccattacctgcgggtcgataccgttatttttcgacttggacattttactcatgccagtgtagaccagctcatgacccgctgcgtcttttgctttgacgatgcggcctttttcatcgcgctcgacgatagcgtcaactggcgaaacccagttacgttcgccgttctcgccgacataatagaacgcatccgccagcaccatgccctgacacagcaactgcttagccggctcgtcagaggtgaccatgcccgcatcgcgcatcagcttatggaagaagcggaagtagagcaggtgcatgatggcatgttcaataccgccgatgtagatgtcgactggcagccagtagtttgccgctttcgaatccagcattccttcctgatactgcgggcaggtgtaacgcgcgtagtaccatgacgattccataaaggtgtcgaaggtgtcggtttcacgcagcgccggcatcccgttaacggtggttttcgcccactcaggatcggccttgatcgggctggtgatgccgtccatgacgacgtcttccggcaaaataaccggcagttgatcttccggcgtcggcagcacggtgccgtcttccagggtgaccatcgggatcggcgcgccccagtaacgctgacgggaaacgccccagtcacgcagacgatagttcactttacgttcgccgacgcctttttccgccagtttatcggcaatggcgttaaacgccgcttcaaaggccagaccgtcgaactcgccggagttaaacagcacgcctttttcggtcagcgcctgttcggaaagatccggctcggaaccgtcggcggccagaatcaccggcttgatggtcaaaccgtatttggaggcaaattcgtagtcgcgctgatcgtgacccggaacggccatcaccgcgccagtgccgtactccatcaggacaaagtttgccgcccagaccgggatctcttcgccagttaacggatgagtcgctttaaagccggtgtcgacgccttttttctccatggtcgccatttcggcttcggccactttggtgttacggcattcgtcgatgaacgccgccagctcggcgttgttcgccgccgctttttgcgccagcggatgaccggcggccaccgccaggtaagtggcgcccataaaggtatccggacgggtggtatagacggtcagcgtgttatcgtaacccttcacatcgaaggtgatttccacgccttcagagcggccaatccagttgcgctgcatcgtttttacggtatcaggccagtggtccagcttatccagatcgcgcaacagttcgtctgcgtaagcggtgattttgataaaccactgtgggatctctttacgctcaactttggtgtcgcagcgccagcagcagccgtcgatcacctgttcgttggcgagaacggtctgatcgttcgggcaccagttaacggcagaagtcttcttgtacaccaggccttttttatacagctcggtgaagaatttctgttcccagcggtagtattccggggtgcaggtcgcgatttcacggctccagtcatagccaaaacccagcgttttgagctggtttttcatgtacgcgatgttgtcgtacgtccacggcgccggcgcggtgttgttcttcaccgccgcgccttctgccggcaggccgaaggcgtcccagccgattggctgcagcacgtttttgcccagcatacgctggtagcgggcaaccacgtcgccgatggtgtagttacgtacgtggcccatgtgtagtcggccagaaggatagggaagcatcgacaggcagtaatacttctctttgctctcgtcttcggtcacttcaaatgtgcgcttctcatcccagtgaagctgtactttggattctatctcttccgggcggtattgctcttgcatggcagccagtagtcctgttttcgatacagctacaaatgtagctttagaggtggtgtttagatccgcatagcatagcccaaacacgcacgtcaaaacagggggtagaacatttgtcgcgccaggcgtccgtgaggaggtgacgcaaaatgcgacacgactgaggcaaattaccgcagttcctgtcaccgccagatcggctcatgaaaataaagttatataaatgaagcagttaaaaaatggcacgccttttgattagggaagacaggactaaagcaaaggagttaatcgtgaaaaaaaatgcagtggtgattcaccctcaggattgcgtcgcgacggctattacggcgctcaaggccggcgaaaccgccacaatgttcattggcgaacgcgagataagcgttgtgttacatcaggatgtgccatttggccacaaattcgccatctgcgatgtgccttttcatggcgaagtttataaatatggcgaatccattggccgtgccactcaggaaataaaaagtggcgactatgtgcacgtccacaatgtggaaagcgaacgcggacgtggtgactggaaataatataaaacaagggaaaatgattatgagcaatgagacttttttggggttccgccgccctgacggccgttttggcatccgtaattatgtactgattttacctaccagcgtttgtgcgaataaagttgcccaggatattgcccggcaggtaaaaggcgcgacatgggtgaataacgattttggctgctgccaggtggcaggcgatgcgcgtctgacggaaaagacattgattaatgtggcgaataatcccaacgtcggcgctattgtggttgtgggcttaggctgtgaaggcgcggagccgctgcgcatcgcagaagagattaccgcatttggcaaaccgacctcctgcattaccattcaggaagagggcggcacgcttaaatgtcaggctcgggggatttcgctggcccgcgactatgcgcaacaactctccatgcaaaaaccgcagcaagcaccggttagcgagctgctgctggcgatggagtgcggcgggtcagatacgacatcggggctggcgtctaacccttcctgcggggtcgcctcggataagctgatacgctgcggcggaagctcaattctttctgaaacgacggaatttattggcgccgagcatgtgatggcgaaacgcgcggtgacgccggaggttggtcaacagcttattgatttagtggtcggctgcgaggcgcgagcaaaagcgctgggcgaggatattcgcgggggacagccgacgccgggcaatattaaaggcgggttgactaccattgaagaaaaatcgttaggctgtatgcataaagcaggtcatgcgccgttacagggcgtcctggaatatgccgatagtccaacgcatccgggcctgtggattatggataccccggggcaggatattgaatctatttccggcatggtggcgggtggagcgcagatcgttatttttactaccggtcgcggaacgcctgccggtaacccaatagcgccggtaataaaaattacgggtaataaagcaacgtgggaaatgatgcaggacaatattgatattgatgtgtccgccattatgtctggcgaggcttctattacgcaaatgggcgaggaaatttatcaggaaattttacgcgtcgcgaatgggaaaacgactaaatcagaagatttaggtcataacgaattctctatttataagatcgcgccgacgttctgataccaaatcgggcagcacaagctgtccggttatctcctgggaataagctatgaaaattaaaaaaacactggaacgttttcctggtggtatgatggttgtaccgctaatcatcggcgcattgtttaaaacttttgcgccggaggcgctggaaataggcggttttgtcacctctatttcgcatggcgcaatggcgattttaggcatgtttttagtctgtatgggcgcggatatccagtttaaagccgcgccgaaagcgttgaaaaaaggcgctgcgatcacctttgcgaaatttgccagcggcgtgattattggcattctggtcgggaaattttgcggcccggatgggttattaggtctgtcggctttagcgattatttcggcgatgaccaactcgaacagtgggttatatgccgcgttggtgggggagtacggcgatgaaaccgacggcggcgcgattgcggtaatatcgttgaacgatggtccctttttcaccatgctggcgttagggtcggcaggcatggtgtcgataccctttatgaatctggtggcggttattattcccattatcattggcatgattttgggtaatctggatgaggacatgcgcaagtttcttaaacagggcagcgtggtaacgattcccttttttgcctttgggttaggatacggtattgatttcgcaagacttatcacggcaggttcttcaggcattttactgggactcatgacggtggcgattggcggattttttaatattttcgccgatcgtgtgacgggaggcagtggcgtggcaggcgcggcggtatccaccacctctggcaacgccgtcgcgacgccagcggcaatcgcgctgctcgatccgcattttaccgacctggcgtcgacggcggcggcacaggtggcggcctcgacgattattaccgctctgtgcgcccccttcctgaccgtatggataaaaaaacgctacgatcgtaaactgaacccagccgccgcaggcggttagcgtttcggcggaaaataaatcacgacgggcggtctcgcccgttcataaaccaacaggatggtgagtgatgaataagacgaaagatatagccgcatctcctctctgttttgtctctccttacccgcaactggcaaaggctgccgaggcgctggtcgcgcagttggattacgccgtcactattcatcaaacgacgcttaatcgtatcctggatgagctacctttattagagtcccgtgggcaccaggtactgattagtcgtggcggatgtgcggaaatattaaaaaagcacagtaaattaccggtagtcgaaattaaaatgtccggctacgacattcttgatgcgcttatcccttttaaaggacaaaaaggcactgtcggtattgtcggcttttccagtgtgatcaaaggatgcgcgcgcgtagcggaacagttaaatattaactataaaatttttaccttacagggaaatgataaagaaacgatttcttgcctgaagcggcaattagcgtccacgccattagattgcattgttggcgataccgtttgtcaggattatttttcaccgctgggctcgcaattccgtttacttgattccagccccgcctcaataaccgaagctctggaagaagcccgctcattatatctggcttttcgcagccaattactcgagcgtcatcatctgcagctgattctcgatcagtttgataaagctgttatcacgcttgatgataccggcgcgttactgcattacaataaatatgcgagccaactttttaaaattaacgcctccggtgagatttatgacgcatctttcctgaaacaggtattgcaccaggagcggcatacattacgtgagggaaaaaccgtcagcgcgaaagtcgtcgatacgccgcaaggcgcgatggtggttaatctgtatccggtatttgcggccagacagttaagccgggtagtgttgacgatgcaaaccgtctccagtttacagggggcagaacatcatgttcgccgccaggaactgtctcgccgcggcttgagcgcccgctatcatttcgacgatctgcttaccgaaaacccggaaatgctgcgtcgtctggcgatcattaaaaattatgccggtacggacgcgactatcttaattaatggcgaaagcgggacggggaaagaggtgctggcgcaaagtattcataatgccagccaacgcgtcaacggcccgtttgtcgccattaactgcggcgcgatggcccctcagattctggagagcgaactctttggctatgtcgccggcgcatttaccggcgcgtcgccgaaaggcaaaataggcctgtttgaattagcgcaccacggtaccatttttctggatgagattagcgagctggataaaccgctacagacgcgcttattacgggtattgcaggagcggcagattatgcggctgggctcagaccagatgatacctgttgatattcgcgtgattgcggcgaccaatcagacgttaacgaagctcattgcggacgggacatttcgcgaagatctttactatcggcttaacgtattaaaagtgaccaccatcccgctacgcaaacgtccggaggatatcaaagccatcggcctgtcgctgcttactagtttcagccagcattataaacgcccggcactaacgttaaccccggcgctgtggcaagagcttcagcgcttcgcctggcccggaaacgtcaggcagttaagcaatattatcgaacggctggtactctctattgatcactccccggcaacgctggatgagggtcgcctcttgctggacgatctggaagaggggagccgacgcgagccaactacctgccacgactgccagatgctggctggcgattataaaacgattcgcctgcgtattttgagaaaattattagaggcggaaagggataataaatcgttagtggcgaaacggttaaatgtcgatcgtacctcgctgacgcgctggatacgtgagtcggcctgacaagaatttacagactctgtgggcagccttgcaaagcgtaacgcaaataacgtctattattataggcagttaacgatccaagaggtgaagtgatgaacaaggttgctcaatattaccgtgaactggtggcctcattaagcgagcgtttacgcaatggcgagcgcgacattgatgcgctggtggagcaggcgcgccagcgcgtgatgcaaacaggggagttaacgcgaaccgaggtggacgaactgacgcgcgctgtcagacgcgatctggaagagttcgccatgagctacgaagagagccaggacgatagcgtcttcttgcgggtgattaaagagagtctctggcaggaactggcggacattaccgacaaaacccagctggaatggcgcgaggtattccaggatttgaatcaccacggcgtgtatcacagtggcgaagtggtgggattggggaatctggtgtgcgagaaatgccactatcatctggcggtttacacgccggatgtgttgccgctctgcccgaagtgtggccacgatcagttccagcgcaggccgtttgagccgtaaggttcattatcgtgagcggacggttgccgtccgccatgttaagcgtgcagttgggcttccagtttgcggatctcttcatcgacgttccatttgcccgtgggctgtgcttttttgaaccagtagagcgcttgttgtaggtcttgtgcggtaccgtgtccatctctgtacatgcatccgaggttgtaccagcccgatgaattgttacattctgctgatttgtggaaccattccagtgctagcgaataattttgctcgacgccatgaccgcatttgtacatccagccgatactgttataggcatcattgtcaccctggtctgccgcttttcgaaaccagtatattgcctgctggtaatcttgtttgataccttttccgatgtaataacaatagcccatctgatattgcgagtagctgctctcttgtagcgcgctcttcttgtaccaaagggcggcaagggataaatttttccgacatcctttcccattgccatacatatacgccagtctttcctggctggcgcaatggccttgtaatgctgcctgtttaaaccagtagagtgcctgtgtatcattttgctctacgccagttcctgaatgatacattctcccgagattatattgcgcaaggttgtggctctgttctgctcctttgcgataccaggcaacggcctgggcataatctggcgccatcccggtttctccttcctgaacccagcctaatgtgttgaaagcgtggcggtgtccttgctgtgcggctttttctgaccagaataaagccagcgtattatctttcatgtcggtaggcgtgtctttgtatcgtaagccgagccaatattgtgcctcgcagtgtccttgttcagctgcctgctgcaaccaataaaaagagagcttatcctcttcgctgccatctatacattcgtcattatataaacggcctaatatatattgagcttcactatttcctgactgcgccagttcggttaattgtgctaaagatacgttgtcgcagggatgactggttatggaatgattcattttttaatttatcccgccattgttttttagattaataatatattgcgatttggctttgttgtactctattttagttttcaattgcgtttttatttgtggtgtgaatatattttggcgatttattatggataaagaatcacaatatttactctttgcactttcctcgccgatggaagtattgaacgaggactgtttaccttcacattcgtcaccgaaaatgtatttaggtgtaaaacgtttcgatcttgaatcgtcgtggggtattgaaaatcgcgatgaactgcttcagaccatttcccgcatgacggatgacggtcatgccacgcaactggaatggctatatcgccgctggtttaggtatgcgccgcaggagtggcaggagtataccgacgcgctggacgagggagatcgcatttatgcccgattcgtcgctgataccgccgtgtgttgcggcgaaggtggtattcgcagttgggattatgtgcggatgggatttctctgccgcatgggcgtgctcaatgaatggctgacggaagaggagagcctgtggctgcagtcgcggatacagcttcgcgcgctcagctattattccggctggttgccgtatttcagcgcttattacaccgggcgtttgtactggcagttacggaatggcgataacctaccgttgctacgcgagacattcgcccgtaaggagtttgatgacgcggggcgacgtatgatgaataagctgatcgcagggaaggacagtttttacgccacgctgccgtggcgctacctgccccattaccctgaatgcccggacacgcttcaggaggtgagcgatctatgaaaacctgttggcaagtccttggcattgaggccaccacggataccgacgccattcgtcaggcttatctggcgctgcttccgtcatttcatccggaaaccgatccgcagggttttaagcaattgcgagaagcctatgagaatgcattgcaggggacaacatcgcccgccattacggtggttgatgaggatcccgataccccgtgggtgaattatctcagggagatattcggtgatttgctggcggatggcgaacggcgctttcagccgcaggcatggcaggagtttatccaacagatcaataaattatcgattttacaggtcgaaaaatcgcgctggtggctgtgcgctatcgcgatgaagacctttcctatttcttactcgtgtctgaaactgctgtcagatcgcctggcttgggaacaggggagtgataatcgagatgtcgatgccgaggaggtggaggatcttttgtttgaaatccgccgtggcgacctgtttgattattcgctattgctgcatttgccagtggcggtacaaaaccagaccattgctttttatgatgccctggacaacacctttttcgagcatcctctctatttcgcccaacttatggcccagcacggcccgtggattatcccggacaatctacgctttcaacgacgtctgttacgctggttcagcaccttgcactggggtattgcggagctgctgcctgtcgccctggcatggcaggaagccgaacccgataacgcaacgccgggttattactacttagcccagcgcgtattttgcggtgaaggcgatagcctgctgccagaactttacgcgcagtggtgggcgcatccttctacccagcttgacgatctgttgctgcgctggtgccgtcagcatcgaccggactttttcccgctgctggtgatggcggttgaggggcgtgagcaggtggatattaacgctgaacagctgctgtatattcccggctcaagcgctcgttcctgcttgctgtgggccgaggcgctgcacagcggcgcattatcgccgctaagcgaaagttttattgcgcggcgtttgaattatggcgcgccagcggtgagtgaggcgcatagccagcatccatactggctgttgtatcaggtggcggatagcctggcgtgcgccgaggagccgtcagcggcattgttacagagtctggtaacgaagcttgatgcgccggatatctgcccgttggaagcgctggttattcgcgggttgctggggcgggctgcggctgtcgccacaccgtgtgaagctgtagtcgcagatgaagaaccggtgacgacggtgacttcgccgagtacggaggaatctggcggcggctttggcctctggcaggtgattaaaatcattttatttattggcgttgtcggccatgtattacgccagtttatgcattagggatatcgaatatggacaaggaagaacaatatttactttttgcgctctccacgccgatggaggtgctatatatcggcaatgagccttcgcatacctctccagcaatgtataccggaattcctgctgtcgatctctccgattcatgggggattgataaccgtgaagatcttattcaaaccatctatcggatgacggacgatggtcatgcggcagatttggctcccttttatatccgctggtttacgctatctcctcgtcaatggcgcgaatttaccgcgcagtttggcgagcagggccagatttatgcgcgatttgttgccgaaaccgcactatgctgcgggcgcggaggcattaaagcctgggactatgtgcgtatggggtttttatgccggatgggggtgttgaatcaatggctgacggaagaggaaagcctgtggctgcaatcgcgtatctatgcgcgggcgtactatttttacgacggttggacgcaatattttgccgcctattcgttgggtcggctgtactggcaggctaaaggggacaccatacaggcatatttcgctcacctaaagtacgacgcttcaggcgcgcggatgtttaatgaactggcctctacgacagagagttattatgcgcagctaccgtggcgtccgctcaacgaacaaccgacatgcccggaaacgcttaaaggagtgagcgatttatgaatatctgttgggaaatcttgggcattgaacctaccaccgatctggaatgtatccgtcaggcttatcttgccctgttgccctcattccaccctgagagcgatccgcagggttttaagcgattgcgccaggcctatgaagaagcgcagcactgggccgcctcgcctgcggaggacgcaaaaacggaagaggtgggcgacgaacatgaaatactggtggcgttcagggaattgctggcatcagagcgcgatcgctttcagccctcggcatggcagaaatttattcagcaattgaaccagtgttcaatggatgagatagataagctgcgctggcagttgtgcgacatcgccatgaaaacagaaacgatctcgctgtcttgcctggcattgttggcgcagcgtctgaactggcagccgcaggaagcagaagatgatgctgatggagaagagctggaagcatttctggagaccgtaaagcggggcgatgcgtttgatctgctaagtctggccaaattgcctcttgttgttcaagaccaaactgacgcctacttttttaagcttgagcgtatctggcgcttttatcccgaacattttgccgacgctctgcaggttcagggagcctggataattcccgatgataaacagctgcatcgtaaactattacactggtttagcgccgagcagtggggcatggcggaactggtcgatattgctcgtcgctggcaggccgcggagccggataacgaagatgcgcactattacctgtgcaaacagcgtttgctctgcggtgaaggggaaagcctgttggccgacctttgcgatttctggcagcgttatccctccacgcaggcggacgacctgttgctgggctggtgccgccagcatcggcctgatttcttcccgctggcggtgatggcggtcgaagcgcgctgtatggcggatgccgaatatgtccccggtgaaagcgcgcgcacgcgtttactgtgggccgacattttgcacagcggtaggttatcaccgctggggcgttcatttgttgactccctgttttataagcgaaaagcgatggcgtgggcaaattcacggctgagtacccagggggaacccgaaacgccgctgttggatctgtaccggacggcggagcaggtggtgctggaagcgtttcccaaagaaaagcccttttttcgcctgctgatccggctggaggaggggcaatcctgtccgctggaggcgctgataacgcaggcattgtcatctaaaatcgccatgaagccaggcgatattcgtgacaaaaaggagctggcggaagagctcaggctggcggctgagaaagaagagacaaaattgtcttctgaagcgaaaaccgaagcaccccgtcaggcggaatctggcggggtgatgaaaatcatgaagattgtcggtttgatcgcgttgattgtctgcgcgttaaatcgattcttccattttttctgaacaggggtagtgaaagcgccgttacggcgctttcggctcgtcaatacccagatattcacaggcgcgacggcgtacgtcatcgacacgctgcatatcattagacagcagggccgcgtcgaaatcggtaataatctcccccagcatttcgcgctcatcgcctaacgcgcgtgaccactgctcctctaactgtgctttaaacgtccggttaatcagcatatcgcggggataaattttcagcgccagcagccgctcgcggctggcgtcgatttgctgcgtcgtcagtgaggtggcattgtgactgatgattctggattcactcttgccgtcttccagcagcacgtcaacttccagcagaccattaatatcgtagctaaaacgaatatcaatggcctgaatgtgcccgttcggcttcagcatgacgtcaaaagaatcaatcaggatattatttttcaccttatggctttcgccctggtataccctgacgcaaatagagtcctgctcagggtgcatggtggagtacgtttccacttttgacaccggaacggtggtattgcgttcaatgatgggcgagaaaataccaggcactccctgtcggttgacttccacgcccagcgagtaggggcagatatccgtgaggatcacctcttcaacgtcttcatggcgcaggcgacaggcggcctgagttgcggcgccaagcgccacgatggtgctgggatcgtaactttgatagggcaatttaccgaataagcgcaccgcgatgcgttgcaccagcggcatctgtgacgcgccgccgaccagcaccaggctgtcaatttgctccggtttgagtcgggagtcgcgcagcgcctgctcaatgggcgtgcgcagccggttgagcaacggtagccacagggcttccagctcatcgtcataaaacgtgctttccagaacgctctcctgataaagccagctcatgcgcagcggggagctgctggcgcattttgcggcttcaacacaggcatacagcgcagccagatcgctatccgtcagcgctgatttatcgaggttccagcgtttcagcacttcatcaagcaacaaatgcgtgaaatcttcgccgccgaggtagttatcgccagcggaggcgtgaacttcgataatcggcgtagcgtattccagaacggtcacatcaaaggttccgccccccagatcgaaaaccagcgaacggctattttgctgcgtatgcaggccataagccattgccgccgccgtgggttcattgatcaagcgcacggcgtttaaccccgcaagctcagcggcaaggcgtgtatgcttacgctgctcatcgctgaaataagccggaaccgagatcacgacatccttgattggctgctgaaggtagtcttccgcatcttctttcagcgagcgtaaaaccagcgaagataattccggcgcattaaacgactcttcacccaaatgccagtgagtattactgcccattgcgcgtttaaataaggcagcggttttatctggatgagatgttttacgagctgcggcaggttttcccaccagaatttgcttattttcatccatactaattatggatggtgttaaatattcaccaaatttattaggtattaattgtgcggctccgtcttgccagacggcgattaaactattagtggtgccgagatcgataccaatcgctaacgttgcattatccattgcgtttaatttatcgggaaagagagtttatagaataaagaacaccaccctctggcgtggtgatctttatcaatgtcacgcctggcgaaagtattcatccataatgttcgtcaactccgggcgctcgccgtcatcattgatggcgaaatcgaggaaaaaagcatcggcctgtggcgtgcgtttctgggccagtaaacgaaacgccagcgggtagtggcaagcataatcgggggtgcgagtcagaaaacggacaaaatcaatcaacaagggggaatgggtataaaacagcgcgcgtaacaatacggcgggaaatccctcttcggtgatcccttgcgccatgattttgttgaggccggcctcgctcagatcgcctgcggcaataatgtctgtgcaggccgcaagattgggataattcgccgcgcagttagccaatgcgttcggccagttgacgcgggtataacgttcgtcatggcgagtaaagtaatcctcccaaagggatggcggtagtttttcgtactgtattttcagggggatgcggcgctgaaactgggcttcttccaggcgctcgccgtcataaaatcgcaggtattgctgtcgcgtctcgtagcatgtcatcgccaccggctggctgatgacccaggtcttcacgggccggccttccagcgcggcggcggtggctttatggtgaccatcaagcaggacgcaaagccaggtgtcattcatataccaggccagcgcgtggctctctggcttatcgcggtaatacccggcgcgttgtgggttaaatcgcgatggggactagcctggcagtaaaaaacagggttcgccggactgatagtgatagtccacgtcagcaatccactgccctgtggtcgcgggattcggttgtttttcgttacccaccgcccagaaaaaatgcccgttgccatccgtcggataaagttcgcgttcttccagccggtaatagccatcggcaaagagtgaaaacagcggcgtcagggcggtaaatgcttcgttcaacccgactcctgtctgattccactcggcaagtgaggataaaaactgcgcggcgccttcatcatcattgctaaaaccggcataaacaaattctgcgcaggttgggcaccaggcttcagtgtaaaaacgaatcagcggcgagccatgccaggagagcgtatgaataccggcgtcagagtcgggagcgtggataacgcagggacgaagcaatgcttttccgttacgtactgaaaacgttatatgggctacatcgtgctgtagcaggctgatttcaggtctattgttacgccaaaacatcgctgttcatccctggattctactttgcgctttatgcgtagtattgcagccgctccgccagcaaatcgacaaatccctggcggtctacatccaccatcaccgtcgcattcggcttattccccgtcaggaaataataatccaccaccgtcatcccctgggtgtatttccccttggtttccacgccgacccaacgctcaacggtggtgaaaatctcgggcttgagcagccaggcgatggtgcacgggtcgtgcagcggtgcgccgacaaatccccatttttcgtctttgtggtactccataaagaagtccagcagttcggcgacgatggtggaaatcgggttaccgatggcgcgaaagcgttcgatatcggcggcgtgaatctgtgccttatgagtgacgtccagcccggccatcaccaccggaatgcctgactggaagacaatttctgccgcttccgggtcgacgtaaatattaaattccgcagcgggcgtccagttacccagcgccatcgcgccgcccatgatcacaatgcgggcgattttcgtatgcagttccggatggctattcagcagcagcgccacgttggtctgtgggccagtggagacgatggtgaccggttgtgcgctctcgcgcagcgtttttgccatcagctcaacggcagtgccgctttgcggggcgaatgacggctcgggcagcgccgggccgttgaggccgctttcgccgtgaacgttatcggcgataatcagttcgcgcatgagaggtttcaccgcgccgcccgccaccggaatatccgggcgtttgagcagtgtcagcatccgcagcacgttgcgcagggtcttctccggcgtctggttaccggcggaagaggtgatcgctttcacttccagttcaggggaggcgagggcgagaacgagggcgatcgcgtcatcatgacccggatcgcaatcaataataatgggcagtgccattgtggctccttgtaagcggtactttgtgacaaggttaacgcccggctggatacgtttcgagaagcgaagcggtaaagcgtgagatagcgcgcactctgacgtgcgcgccgggaagattagtgcaggattttcgcaaggaagtcttttgcgcgatcggaactggggttagcgaagaactcctcttttggcgaatcttcgacgattttaccttcatccataaagatcacccggttagccactttacgggcaaagcccatttcgtgcgtcaccaccatcatggtcatcccttcgttcgccagctcgaccatcacgtccagtacctcgttgatcatttccggatcgagcgcggaagtcggttcatcgaataacatggcaatggggtccatacatagcgcgcgggcgatcgccacgcgctgctgctgaccgccggaaagctgcgccgggaacttgttggcatgcgcagacaggccaacgcgctccagcagcttcaggcctttatcgcgggcggcggccttatcgcgtttcagcactttcacctgcgccagcgtcaggttttcgatgatcgacaggtggggaaacagctcgaagtgctggaataccatgcccacgcgggaacgcagtttcgccagatcggtttttttgtcgttcacaataatgccgttaacggtaatttcgcctttttgcaccggttccagaccgttgacggtcttaattagcgtggatttaccggaacccgatggcccgcagactaccaccacctcaccttttttcacttctgttgaacaatcggtcagcacctgaaagtgaccataccattttgaaacatttttcagggtaatcattaaactgtccttttcttcaaatagctgaccagcaacgacgcgctcaggctgataacaaaataaacggcgccggcgaacagaatcatttcgacctgagtaccgtcacgctcgccgatagtcgacgcggtgcggaagaagtccgccaggctgagtacataaactaaagaggtgtcctgaaatagcacgatgccctgcgtaagcaacagcggcaccatcgcccgaaacgcctgcggcagaataatgagcttcatcgactgccagtgggtcatccccagcgccagcgcggcgctggactgcccgcgggaaatactttgaataccggcgcgaataatctcggaatagtaggccgcttcaaacatggagaatgccaccatcgcggagatcaggcggatatcggttttcggcgatagtcccagcacgttttgcagaaagccgggtacaatcagatagaaccacagcaagaccatgaccaacgggatggaacggaaaacgttaacatacgctttagcaaaccaggcgataggagcaaagcttgagaggcgcatgacggccagaatggttccccagactatccccacgacaacggcggtgacggtgatcttcagcgtgatgaccaacccggccagcaggtaaggcagtgaggggataatcgaactccagtcaaattcgtacattatttgctccccacgttgcccggcaggcggactttgcgttcaaccaggctcatgaccagcatgataacggcgttaatcagcacataggccagcgtaatggcggtgaaggattcccaggcgtgcgccgagtaatccaacagtttgcctgcctgcgccgccatatccaccaggccgatggttgaggcaatagccgagtttttcaccaggttcatcatctctgacgtcattggcggcacgataacgcgataggcattcgggagcaggacatagcgataagcctgcggcagcgttagccccatcgccaacgccgcgttcttctgcccgcgaggcagagactgaatcgcggcgcgcacctgttcgcaaacgcgggcggcggtaaacagtcccagacagatcattgaggagaggaaaaactgaatattgggatcgagttccgccttaaaccacatgccaagatcttccggcaacagttcaggcaccaccaggtaccaggtgaagaattgcacgatcagcggcacgttacggaacagttctacgtacaacgtgcccagtccggagaggaaacggttgggaacggtacgtaaaatgccgaaaatagatcctaccaggaaagcgataatccaggcggtaatcgaaagggctacggtgacctgaaaaccactccatagccagccgagataggtggtattgccgaagggggcttcctgtaaaaaaataccccagttccagtctattgacatacatctactccgaaaaaaaagggtagcagcgctaccctcgaagattgttgcccggcgatttgcggcttcaggcccgatggggaacgaccatcaggcttatagtctgtccgtgctgagcgacaatcgagaggacaggagtcccgtcccatttagttttagttagttaagcgctttatcattcggtgctttgaacagggctttcatctcgtcagacaactcgaaattcatgttcaggtttttcggtgggatcggatttttaaaccacttatcaaaccacttttccgcttcgccggaggtttgcgcctgagcgatggtatcgtccatcagctttttaaactcagggtcgtttttacgcagcatacagccgtaggcttcctgggactgcggtttaccgacaatctcccagttatccggtttcttggctttggcgcgctcgccggccagcagcgcgtcatccatcataaaggcgacggcgcgaccgctttccagggtgcggaacgagtcaccgtggtctttcgcgctaataatacgcatccccatcttttgctcttcgttaagcttatgcagcagaatttcagaggtcgtcccggaggtgacgacgaccgctttgcctttcagatccgggaaatctttaatatcgccgccttttttagtcagcagtcgcgtcccgacgacgaaaatcgtatcggagaaagcggcctgtttctggcgctcaaggttgttagtcgttgaaccacattcaaaatcgaaggttccgttttgcaacagcggaatacggttttgcgaggtgatcgggatcagcttcacctgcagatcgggcttgttaagtttcttttttaccgcttccacaatggcgttggagtagtcctgggaatagccgaccactttctgctggttgtcgtaataagaaaagggcacagaagattcgcgatgcccgacgacgatcacgccatttttagcgatcctgtccagggtgctaccagcggcaggcgcgccatcttctgcgtgcgcaaggcccgcagacagtcccatgaccagcattgctgtggttagcttacgtaattgcatatccaactcctttatcatctgcgccgtcgacgcattgatagctattgtgatgttgttattgcctgcaacttgcgcgtgcagtgttatgtgtgtttgttaacatttagtgtggcttgttgtaaatattttgctgcgatattgtttatttttgcgaagtgcgccgcaccgttcagaggcaaaaatcctacattgcaccgttcaggtgctaccgatgatcgattttggtgcgaccaggttgcacaagcagccagaacaggtttgccatgtttaacaaagcaatagacgtgccagaatgggggaaaaaggaggattttcaggccggataaatgaagcgctatccggcctggggagagattatttccgtcgttgtcgcagactcatcactaccgcgccaaaagcaaacagcgcggtcagtacccatagcggccagttgccggtacgggcatagggagttaaccccgtggttggcgtgacattggtggtcagtacctggcgtgtgaactgcgggatcatcgcctgaatctcgccctgagggccaatcaccgccgtaataccgttattagtactgcgcagcaacggacgcgccagctccagcgaacgcatccgcgccatctggaaatgttgccacgggccaatggacttaccaaaccaggcgtcgttagaaatcgtcagcagatagtcggtgtccgggcggaagttatcccgcacctgttcgccaagaataatttcataacagattgccgccgtcagcttatagtcgtgcgcatgtaactgcggctggatataagggccgcggctaaaggaggacatgggcagatcgaagaacggcgccagcggacgcaggatagactccagcggaacgaactcgccaaagggtacaaggtgatttttattgtagcgattgggcgagtcataactgtatggattatccttgcccaacgtaataatcgtattgtaggtgtcgtatcgattctgtttattgagacgcgcatcgacaataccggtgatcagcgtgctatttttttcgcgtaacatctcgtccagcgaacgaaggaagggctgctgattgatttcgagatccggaatcgccgactcaggccagataataatctgtgatttgcctaactctgggcgggtttcgttgagataaatttttagcgtattcagtagctggttttcgtcccacttcagcgactgcggaatatcgccctgcaccagcgatacctgggtcgctttggccggttccagcgtaaaccactggatataacgtagcggaaagggcaaagcaaacagaatcacggcgacagccagcggacgccagttccgcgtcgccagtgccagcgctaacaggccgctgaccatcatcagcaggaagttgatcgcttcgacgcccattaccggcgccaggccttttagcgggccgtcgacctgactatagccaaattgcagccaggggaagccggtcagcacccagccgcgtaaaaattcggtgatttgccatattgcaggcgcggcgatagcgacgcgcagccagttggtttttggccacaggcgcgacaaaatcccggcaaacagtccggtatacagcgagagataagctgcaagcagcaccaccagaaaaacgttaaccgggcccggcatgccgccaaactgcgcgatactgacataaacccagttaatcccgctaccgaaaagtccgagtccccagcaatagccgatggcggcagactggagcgggcggcgattaaacgttaaggcctgcagcccgataagcgacactatcgctgcgggccagacgtcatacggagagaaagccagtgttccgcaggcgccgaataataacgccagcagcaggcgaatacgctggcgttcaattaacgaggcaaatgccatttttagtccactattgctgttattcgtccagttttggctggggcgagtcatccgggatcctgacatgcacctgaataatacgacgactatcggccatcgccactttgaactggtaaccatcaatgtcaatggtttcgccgcgggccggtaaatggccgaacgcctgcatcaccagcccgccgatggtatcgacctcttcatcgctgaagtgggtgccgaaagcgtcattgaagtcttcaatcgacgccagcgcgcgaatcgtccaggtatggcggctaagctgacggaagtcgatatcgtcttcttcgtcatactcatcttcaatttcaccgacaatcagttcgaggatgtcttcgatagtcacaaggccggaaacgccgccaaactcatcgataacgatggccatatggtagcgctgggagcggaattccttgagcatacggtcaacccgtttgctttccggtacgacaaccgcggtgcgtaacactttgtccatgctgaaggcttcggcatcgctgcgcataaacggcagcaaatctttggccatcagaatcccttcaatgtgatctttatcttcgctgatcaccggaaaacgcgagtgggcggactcgatgataacatcgagacattcgtccagcgtctggttgcgtttcagggtaatcatctgggagcgcgggatcataatatcgcgaacgcgctggtcggcgatgtccattacgccttcgagcatatcgcgcgtatcttcatcgataagctcgttctgcccggaatcacggatcagcgccagcaactcatcacggtttttaggttcaccgtggaaaagctggctgagtagcagggaaaaaaatccctttttactgtttactgtgtcactactgtgtgaattgtcgtcgctcatggcgtcgtatgggttctcatgttagttaatacaaagctcgtcatgcgtatactcagctgtgacggcatgttttgcctgatggcgctacgcttatcagggctacaaaaggcatgaatgtaggccggataaggcgcaagcgccgccatccggcaagctactattctgcaatcttctcggcaatgtacggatcctcatagcccatagcaagcataatctccgtttcgagagactccatctcttccgcttcgtcatcgtcgatatgatcgtaacccagcaaatgcaggctaccgtgcacgaccatgtgcgcccagtgcgcttccagcggcttgctctgttcctgcgcttcctgctccacgacctgacggcaaataatcagatcgcccagtagcggcatttcaataccggggggcgcttcaaacgggaaggagagaacattagtgggtttatctttcccgcggtacgtcagattaaggtcgtggctttcggtctcatccaccagacggattgtgacttccgcctcttcctgaaactgcggaataacgccgtccagccagcgttgaaactgagcttcatccggcaggcccgcgtggttttcacaggccaactgtaaatcgaggatcacctggctcatttctgttcctgctcctgggcttcacgcttacgctccgccgccaacgccgctttgcgtttttgttctgcctcttcccaggcttcataggcgttcacaatgcgggcaacgaccggatggcgcaccacgtcttcgctgtggaagaagttaaagctgatttcatcgacttccgccagcacttcaatagcatgacgcaagccggatttggtgttgcgtggcaggtcaatctgcgtcacgtcgccggtgatcaccgctttcgagttaaagccgatacgtgtcaggaacatcttcatctgttcgatagtggtgttctggctttcatccagaatgataaaggcgtcgtttaatgtgcgtccgcgcatataggccagcggcgcgacttcaatcacattgcgttcaatcagcttctcgactttttcaaagccgagcatttcgaacagcgcgtcatacagcggacgcaggtacgggtccaccttctgacttaaatcgcctggcagaaagccgagtttttcgcccgcttccaccgccggacgggtcagtagaatacggcgaatctcctggcgctccagggcgtctaccgcagcggcgaccgcaagatacgttttaccggtacccgccgggccgacgccaaaggtaatatcatgatcgagaatattggcgatgtactgcgcctggttcggggtacgcggtttaatcacgccgcgcttggttttgatattgatcgctttgccatagtcaggcacgctttccgcgctctgttccagcacccgcgcttctttgatcgccagatgaatttgttccggttcgatatcctgagtctggccgcgcatcggtgcggtatcgacatacagacttcgcaaaatatctgtcgccgcggtcacgcaaatcggacgaccggtcagtttaaagtgattgtcacggcggttgatttcaataccgagacgacgttcgagctgtttaatattgtcatcaaacggcccgcaaaggctcaacagacgggcgttgtctgcgggctcaagggtaatttcgcgagtgtctatattcaaactgttcctcttgtgtctgtatcgccggacgctgaacatttaccggcatctaaggaaattattcacgccatagggaaaaggcgcaagcattgcaatgaagatggggatgaagagggaaaattgcaaggcccgtcgggcgacaggccatgaccaggaagcccgacaggcgtagcgccatcgggcattattgcctttcctgcaggattaaggctggtagaatcctacgcccagctcattttctttacgggtacgggcaatgacggactccggtgtttcggcgacgcgcagacccatttcatcttcggtacgcaccacttttccgcgcagggagttcggatagacgtcagtaatttccacatcgacaaacttaccaatcatctccggcgtgccttcaaagttcaccacccgattgttttcggtacggccagacagttccataatgtttttacgtgacgtgccttccaccagaatgcgctgtgtcgtgccgagcatacggcggctccatgccatcgcctgctgattgatacgctcttgcagaatatacagacgctgcttcttctcttcttccggtacgtcatcaaccatatcggcagccggcgttcccggacgcgcagagaagataaagctgtagctcatatcaaagttgacgtcagcgataagcttcatggttttttcgaaatcatcgttagtttcgccagggaaaccgacgataaagtcagagcttatctgaatgtccggccgagccgcgcgcagtttacggatgattgctttatattccagcgcagtgtgggtgcgccccatcagattcaacacgcgatcggaaccgctctgtaccggcagatgcaggaaactgaccagctccggcgtatcgcggtacacctcgataatatcgtcggtgaactcaatcggatggctggtggtaaagcgaatacggtcaatgccgtcgatggcggcaaccagacgcagcagatcggcaaaggtaccggtggtgccgtcgtagttttctccgcgccaggcgttaacgttctggcccagcaggttgacctcacgcacgccctgcgccgctaactgggcgatttcgaacaggatatcgtctgagggacggctgacttcttcaccgcgggtatacggtaccacacagtaagtacaatatttattgcagccttccatgatagaaacgaaagcggtcgggccttctgcgcgcggttccggcaaacggtcgaacttctcgatttccgggaagctgatatcgaccaccgggctgcggtcgccacgcacggagttaatcatctccggcaggcggtgtaaggtttgcgggccaaaaataatgtccacgtaatgggcgcgttgacgaatgtgctcgccttcctgggaagccacgcagccgccgacgccaataatcagatcgggatttttctcttttaacagtctccagcgacctaattgatggaagactttttcctgagccttctcgcggattgagcaggtattcaacagcagcacatccgcctcttccgccacgtcggtcagttgatagccgtgggtggcgtccagcagatcggccatcttcgatgaatcgtactcgttcatctgacagccccaggttttaatatggagttttttagtcatcgacttgctcttgcgaaatagtggctgaaaagcagggcgcatagtgtaatgctttggcgcggttgtgaccagtatgactgacgtcagccctaatgggtaaaaaatcctgtaaacttgtctaaaacgtaacaggatgaatgaccatgacaaatcaaccaacggaaattgccattgtcggcgggggaatggtcggcggcgcgctggcgctgggtctggcgcagcaagggtttacggtgatggtaatagaacatgccgcgcctgcgccgtttgtggctgacagccagcctgacgtgcggatttcggccattagcgcggcatccgtggcgctgctcaaggggctgggcgtttgggaggcggtgcagggaatgcgtagccatccttatcggcgactggagacctgggagtgggaaaacgcccatgtggtgttcgacgccgctgaactcaagctgccgctgttaggctatatggtagagaacaacgtcctgcaacaggcgctgtggcaggcgctggaagcgcaccccggcgtgacgctgcgcgttccggcttcactggcggcattgcaccgccgccacgatggttatgcgctggaactggccgacggcgaatgggtaacgccgaagttagtgattggcgccgacggcgcgaattcgcaggttcggcaaatggcgggaattggcattcatgcctggcaatatgcgcagtcgtgtatgcttatcaccgtcaagtgtgaaaatgcgccaggcgacagcacctggcagcagtttacgccaacggggccgcgcgcttttttgccgctgttcgacgattgggcgtcgctggtgtggtatgacgctccggcacgtattcgccagctacagagtttatcgatgacgcaattgcaggtggaaattaaccagcactttccggcgcgtctgggggcggtgatgcctgtcgcggcgggcgcgtttccgctaacccgtcgtcacgcgttgcagtatgcgcaaccggggctggcgctggtaggcgacgcggcgcataccattcatccgctggccgggcagggcgtcaacctggggtatcgggatgttgatgcgttgattgatgtgctggcgagtgcccgtagctatggcgagtcctgggccagtcattcggtgttgaaacgctatcagacgcggcgcatggcagataattttatgatgcaaagtggaatggatctgttttatgccgggttcagcaatgaactgccgccactgcgtattttacgcaatatggggctgatggcggcgcagcgcgcaggcgtgctaaaacgtcaggcgctgaagtatgcgttgggattgtaacccgctgaatgccttacccggtttgtaaaaacgctcaattgcaggtcgggtaagcgtattgacatcttactttactgcaaataaagcacataaacctaatttccctttgaaatcaatttcataccaaggtgatgccatttcaattgtgcatacgttgtattggcaacgtactactttatgtagcatcagtaatgtggaactcattgattttaccagaatcgccagggtgattaatgcggcgagaatccgataccacgtcagtgttgcatgttggacatcaaaccacagaatataaaaagtgatgatgtgaagaatgactttgctggacagagcgcgaatatagaatccacgcagcgcccttttcgaggaaaacgcgacattaatcagcgcgctttgtttttcttgcacagggatccctggcagatacactatccattccgcactattctggcgtagcatgaccgcctttttctggtgcagtatatgtagcctcattgacactgccacggggtaaaccagacccaaaataatcaaccaggcggcgctggccgtgatatcaatgaaggtgaaagcgcagagcaagacgaccataaaaaatgttaatggccgcaaaaagagataccaacaaaactggtaattcattgtgaggttaccgaacgctccctgtaaggctttatcatagcgttttactgatagcagggcattaagggggaaacctctttcggaatttataaacgcagaaaagcaaaaagctcgccgaagcgagctttttaaaggtggctggggtacgaggattcgaacctcggaatgccggaatcagaatccggtgccttaccgcttggcgataccccaattgtcgtacttcttgcgctcgttagcagagcgtctttaaaactggctggggtacgaggattcgaacctcggaatgccggaatcagaatccggtgccttaccgcttggcgataccccaacaaattattttcgaaccggtcgaatatctcgacgcgttctgaatatggtggctacgacgggattcgaacctgtgaccccatcattatgagtgatgtgctctaaccaactgagctacgtagccagatgatttcttcgatggctggggtacctggattcgaaccagggaatgccggtatcaaaaaccggtgccttaccgcttggcgataccccaataccgtcgcggtgaaccgcaaactcgaagaaatatggctggggtacctggattcgaaccagggaatgccggtatcaaaaaccggtgccttaccgcttggcgataccccatccgtacaacgcttatcggtgaatggtgcgggaggcgagacttgaactcgcacaccttgcggcgccagaacctaaatctggtgcgtctaccaatttcgccactcccgcaaaaaagatggtggctacgacgggattcgaacctgtgaccccatcattatgagtgatgtgctctaaccaactgagctacgtagccatcttttttcgcgttaccttatcggcgttgcggggcgcattatgcgtattgagccttgaagcgtcaacctctttttcatcgaaaaacgtcggaaagtgtctgtttggttaggttgcgaacagcgtggcgcaatattcggcaattattggttattaatcgtttttccgaaagtggtttgctataaaaaaagagcccctaagggctctttcgtcatcgttaatttactggtacgccgactgatgcacgccgaccgcgcggcctgacgggtcatccatcgttttgaatgcttcatcccactcaatggctttggcggaagaacaggccacggacgggccgccgggtacgcattccgccgcgctcggcaccgggaacaattcttcaaaaatttcccggtacaagtacgcctctttagacgacggcgtgttgtatggaaagcggaagcgggcggtttccagttgttgatcggaaatctgtttcgccgtcacttctttcagcgtatcgatccagctgtagcctacgccgtcagagaactgctctttctgacgccacgcgacgcttgctggcagataagactcgaagcactcgcgcagcacgtgtttttccatcttgccgttgccgcacattttatcctgtgggttgatacgcatcgccacgtcgaggaattttttatccaggaacggtacgcgcgcttccacgccccaggcggacatcgctttgttggcgcgggcgcagtcatacatatgcagcgcctgtagcttacggaccgtctcttcatgtaactctttggcgttcggcgctttatggaagtacaggtagccgccaaacacctcatcggaaccttcgccggagagcaccattttgatgcccatcgctttgatcttacgcgacatcagatacatcggcgttgaggcgcggatagtggtcacgtcataggtttcaatgtgatagataacatcacgaatggcatcaaggccttcctgcacggtgaagtgaatttcatggtgcacggtgccgaggtggttagccacttcctgggccgccttcaggtcaggcgaaccttccagaccgaccgcaaaagagtgcaactgtggccaccaggcttcggagcgctcctgatcttcgacgcgacgggcggcgaattttttggtgattgccgaaataaccgacgagtccagaccgccggagagcagcacgccatagggcacgtcggacatcaggtggcttttcacggattcttccagcgcctggcgcagcgcgtttttgccggtgacgttgtcttttaccgcatcgtaatcgaaccagtcgcgctgatagtactgacgaatttcgccgtctttgctccacaggtagctgcccgccgggaactctttaatggtgcggcagaccggggtcagcgctttcatttctgacgctacgtagaagttgccgaattcgtcatagcccatatagagcggaataataccgatatggtcacgaccaatcagataagcgtctttttcgctgtcatacagggcgaaggcgaacatcccctgtaaatcgtcaaggaaatccggccctttttcctgatacagcgcgagaataacttcgcagtcggagcctgtctggaacgcgtaacgatcgccatactccgcgcgtaacgtctgatggttataaatttcaccgttcaccgccagtacgtgggtttttctggcgttatacaggggctgggcgccagcgttaacatcaacaatcgacaagcgttcatgtgcgagaatcgcgttatcgcaagcgtagatgccggaccagtccgggccgcgatggcgcatcaggcgtgacagttcaagggcttttttacgcagttccgctgcatctgttttgatatcgaatacgccgaaaatagaacacatagccttctccgttaatctgttgcgtcgtactttttgtatttgcttgactaaaaaatgccgcaaaggcgtggaaggcgcaaggggattacggtctgaaaaatgaaaaatgcaatcgtcattgttgattagtgaaaaatgattacgtattgcgcggatttattgatggatcttcagttttatcgtggtttaattgaattatgtttttcctgatgacgtttcgcttatcaggcctacaatgttgttcgaaccgtaggcctgaaagcggcgcgtcatcgggcaggggacaggtttagataacgtctatctcggcgacggaagggtaaatccagcttgggcggaacggcatactgtcaatatcattgattgttgatacgcctgaaagcaccagaatggtctccagaccggcctggaaccccgccagaatgtcggtgcgcaggttgtcgccgacgataacggtctcttccgagtgcgcctgcattttgtttaacgccgcgcggatgatccacgggctgggtttgccgacataaaacggcttccggccggaaattttttcaatgcctgcgcacagcgcgccgcaggccggataaaagccgcgaccgtgagtatccgggttggtagcgataaagcgtgcgccattggcgacgaaaaatgctgctttatgcatcatgtcccagttgtaggagcgggtttctccaacgatgacaaaatcagggttcacatcggtaatggtaaaacccgctttatagagctcgtgaataagcgcgccttcgcccacgacatacgcttttttaccttcctgacggcgcagaaaatcggctgtcgccattgctgacgtataaaacacgctgtccggcacgttaacgccagcggtagcaaaacggttcgccagatcctggccggtttgcgacgggtaattggtcagcagcaccagcggcagacctttttccagaatccccgtcagaaattccgccgcaccgggtacggctacgttgtcgtgcatcagcacgccgtcgatatcgcagattacattcttgatggtcatgaactacccagggaatttgtgaataatccgatactataagagcgcatcaactttccagcaaacgttgcagcaatgttccgttgagcatggcgcgtttaactaaggcaaatgcgccgatagcagaacggtgatccagcgtggagcgtaccaccggcaaatttttgcgaaatgcctttaacgcctgcgtattgatacagctttcgatagcgggcaacaggactttatcggcttcaatgatctcgccggcaatgacgattttttgcgggttaaacaggttgatagcaatggcgatcgttttgcccaaatggcgaccaacatgctcaatgacttccgaggccaggctgtcgccccggtttgccgccttacagatggttttaatcgtgcagtcgtcaagcggaacacggctttgatacccttgtttaagcaaattcagcacccgttgttcaatcgccgcattggcggcaatggtttccagacagccgaaattaccgcagtggcagcgctcgcccagcggctccacctgaatatgcccaatttcaccgacgttgccgttacggccaatgaagatgcgtccgttggagataatcccggcgcctgtaccacgatgaacgcgcaccagaatcgagtcctcgcaatcctgactggcgccgaagtagtgttccgccagcgccaggctacggatatcgtgtcccacgaaacaggtaacgtgaaaccgtttttccagcgcttcgaccagtccccagttttcaacctgaatgtgcggcatgtaacgaatcacgccgctttccggatcgacaagccctggcaggatcaccgagatagcgatcaattcacgaattttacgctgacagctatcaataaagacggcgatggtgttgagcagcgcatgttccagcgtctcctgggtgcgctccggtagcggataatgctcctcagcgaccactttactgctcagatcgtagagcgttaaagtggtgtcatgacggcccaggcgaacgccaatggcgtggaagttacgggtttccgtgacgatagagatagcgcggcggcctccggtagaggcctgctgatcgacttctttgatcagcccgcgttcaatgagttgacgcgtaattttcgttacgctggcgggagcaagctggctttgctcggcaatttgtatgcgcgagataggaccatgctggtcaatcaggcggtaaacggccgcgctgttaagctgttttacgagatcaacgttacctatctgagcttgtccgcctggtgtcatattctcacttactcaagtcaacgacctcgtcaccattaacgatggtcttgataattttaaaatcgtgggtgaacgcggtcaggttggcgactttacccggcgcaatgctaccgagatgcttatcaacgccgatagcgcgtgccggatagagcgttgccatgcgcagcacttcatccagcgcgatgccgcaatgcgcgaccaggttgcgtacgccttcaatcatggttaaggacgaaccgctcaacgtaccgttttcatccacacacagtccattgcggtagtatattgttttacctgcgaaaatgaactgctcaatattggcccccgccggtgcggtggcgtctgtcaccagacaaagtttgtcgcctttaaggcgtttggcattgcgaatgttggcgtagtcgacatgcagaccatcggcgataacgccgcaataaatatccgcttcgtccagaacagcgccagcaaggcccggctcacgccctgtaatgtacggcatcgcgttaaacaggtgagtcgcaaaagtaatcccggcgcggaagcctgctttcgcctcttttaacgtcgcgttggagtgacctgcggaaaccacaatgcccgcattcgccagtttagcgattacgtcagcaggcaccatttccggcgcgagagtgactttggtgatgacgtcggcattatcgcataagaaatcgaccagcgcagcgtctggtttacgcacgaaatcaggattatgggtgcctttttttaccagattaagccaggggccttccaggtggagacccagcgcctggtgcggatgtttttccaggtattcgcgcatgacgcgaatgccctgtttcatcaattcgtcgctggtagtgataagcgttggcagaaagttagtacagcccgatttttcattggctttctgcataatttccagcgtttcaacgctgacggcttctgcggtatcgttaaactgcacgccgccgcagccgtttagctgcacatcaataaaaccgggggagagaatggccccattcaatgagcgttgttctattcccggcggcagttcggccatcggacaaacgcggtcaatcaggccattagcgacaacaagcgcatggtcatcaagaatttcgtgaccggtaaagatccggccctgggttaaagcatacattccgacccccgatatcaaaaatttaccgccccgcattgactggcggggcggagacaacattacagacctttaatattttctgcttctaattcattgaaatatttcaatgttttaactttaagttccattgtggacggctcatcgcataccacaaccgctttcggatggagttgcaggcagctaatggtccacatgtggttgacgttgccttcaaccgccgcctgcagcgcctgggctttctgatggcccagcaccagaatcatcacttcttccgcatccagcagcgtgcctacgcctaccgtcagcgcgtatttcggcacctggtttacgtcaccgtcaaagaagcgggagttcgctacgcgagtatcatgggttaacgttttgatacgggtacgggaagccagggaagacgccggttcgttaaaggcgatgtgaccgtcgttgccgacgccgcccataaacagatggattttaccgtaagaacgaattttttcttcatattgacggcattccgcatcgatatccggtgcgttaccgttgagaagattgatgttttctgctggaatatcaacgtgatcgaaaaagttacgatgcataaagctgtggtagctttccgggtgctctttcggcaggccaacatattcgtccatattaaaggtgaccacatgcttaaagctgacctcgcccgctttgtgcatctcaaccagcgctttgtacgccgttagcggcgtgccgccggtaggcagtccaaggacaaacggacgatcggcggtcggtttgaacgcattaatacggttaacgatatggcgagcggcccatttgccaacctgttctgcggtactcagggggatcagtctcattcttcacctcgataatcaatgtcaaaatttggcggatcgtattaagcgtaacctggatatccagggttcgtgttcaatccgtcctgattttttgaatcataaaataagttttccgtgttagccagtggatggtgggggtgattacgatatttagtgattataatcacaaaaaacacccgtttaatttgcgaggcgaattaattttccacacactctgcagaagatgatctcaccgttcgattacagaacatcacgtttttaacgtttgcagcacaataaaaaacggcttcaaagaagccatatcggcgtctcgtagggggaataagatgaatattttaggttttttccagcggctgggtagggcgttgcagctccctatcgccgtgttgccggtggcagcgttgttgctgcgattcggccaaccagatttgctgaatatgccgtttatcgcgcaagcgggcgggtctattttcgataacctggcgctggttttcgctatcggcgtggcctccagttggtctaaagatagcgcgggcgcggcagcactggcgggagccgtgggttacttcgtcatgaccaaagcgatggtgacgattaacccggaaatcaacatgggcgtgctggcggggattattaccggtctggtcggcggcgcggtttataatcgttggtctggtatcaaactgcctgattttctcagtttcttcggtggaaaacgttttgtgccgatcgcaacgggctttttctgtctggtgctggccgctattttcggttacgtctggccgccggtacagcatggcatccatgcgggcggtgaatggatcgtttccgcaggcgcgctgggttccggtatctttggcttcatcaaccgtctgctgatccccaccggtctgcatcaggtactgaacaccatcgcctggttccagattggcgaattcaccaatgccgcaggcactgtattccacggcgacatcaaccgcttctatgctggcgacggcacggcggggatgtttatgtccggcttcttcccgatcatgatgtttggtctgccgggcgccgctctggcgatgtatttcgccgcgccgaaagaacgtcgtccgatggtgggcggtatgctgctgtctgtcgcgatcaccgcgtttctgaccggcgtaaccgagccgctggaattcctgtttatgttcctggcgccgctgctgtacctcctgcacgccattttgactggtatcagcctgttcgtcgcgacgttgctgggtatccatgcgggcttctctttctcggcaggcgcgatcgactatgttctgatgtataacctgccagcggccagcaataacgtctggatgttgctggtgatgggcgttgtattctttatcatctacttcctgctgttcagcgcggttattcgtatgtttaacctgaaaacgccgggccgcgaagataaagttgatgagatggtaacggaagaagccaacagcaacaccgaagaagggttaacgcaactggcgaccagctatattgctgcggttggcggtacggacaacctgaaagcgatcgatgcgtgtattacccgtctgcgcctgaccgtgaatgactctgctcgcgttaacgatgcggcctgcaaacgcctcggcgcttccggggtggttaaactgaacaaacagaccattcaggttattgtcggcgcgaaagcagaatcgattggcgatgaaatgaagaaagtggtggcgcgggggccggtcgcggcagcgtctgctgatgcggctcacgttgcaacacctgctccggcggccaaaccccaggcggtgccgaatgcggtgactatcgctgaactggtctctccgattaccggtgaggtagtggcgctggatcaggtaccggatgaagctttcgccagcaaagcggtcggcgacggcgtggcggtgaaacccaccgataaaaccgtggtttctccggcggcgggtactatcgtgaaaatcttcaacactaaccacgcgttctgtctggaaaccgaaaaaggcgcggagatcgttgtccatatgggtatcgataccgtcgcgctgaacggtcagggctttaagcgtctggtagaagagggtgcggaagtcacggcgggtcagccggtgctggaactggatctggacttcctgaatgccaatgcgcgttccatgataagcccggttgtttgcagcaacagcgatgacttcagcgctctggtcatcaaagcggatggtcacgtggtggcgggtcaaacgccactgtacgagatcaagagcaaataatcgcttcctggccggataaggcgtaagacgccatccggcgatatcacagaaaacataagcggcagaggggaaccttcgccgcttttttttaccgcaattagccccaatattttctgcaaagccactttttaagtaactaaaggttgtcagtctgtccggcttataagatcatatgccgttatacgttgtttacgctttgaggaatccacgatgagtgaggctgaagcccgcccgactaactttattcgtcagattattgatgaagatctggcgagtggtaaacataccactgtccatacccgttttccgccggagccgaatggctatctgcacatcggccacgcgaaatctatctgcctgaactttggcatcgcgcaagattatcagggccagtgcaacctgcgtttcgatgacaccaacccggtaaaagaagatatcgagtacgttgattcgatcaaaaacgacgtcgagtggttaggctttcactggtctggcgatattcgctactcctccgattactttgaccaactgcacgcctatgcggtcgagctaatcaataaaggcctggcctacgttgatgagctgacgccggagcagatccgtgaataccgcggtacgctgaccgcgccgggtaaaaacagcccgttccgcgatcgcagcgtggaagagaacctcgcgctatttgaaaaaatgcgtaccggcggttttgaagagggtaaagcctgtctgcgcgctaaaatcgacatggcgtcgccgtttatcgtgatgcgcgatccggtgctgtaccgcattaaatttgctgaacaccaccagaccggcaacaagtggtgcatctacccgatgtacgactttactcactgcatcagcgatgcgctggaaggcattactcattctctgtgtacgctggagttccaggataaccgtcgtctgtacgactgggtgctggacaacatcaccattccggttcacccgcgccagtacgaattctcgcgcctgaatctggaatacaccgtgatgtccaagcgtaagctgaacctgctggtgaccgacaaacacgtcgaaggttgggacgatccgcgtatgccgactatttccggtctgcgccgtcgcggctataccgcagcttctattcgtgagttctgcaaacgcatcggcgtcaccaagcaggacaacaccattgagatggcgtcgctggaatcctgcattcgcgaagatctgaacgaaaacgcgccgcgcgcgatggcggtaatcgatccggtaaaactggttatcgaaaactacccgcagggcgagagcgaaatggttaccatgcctaaccatccgaataaaccggagatgggcagccgtgaagtgccgtttagcggtgagatctggatcgatcgcgcagatttccgcgaagaagcgaacaagcagtacaagcgtctggtgatgggcaaagaagtgcgtctgcgtaatgcctacgtcattaaagcggagcgcgtagagaaggatgccgaagggaatatcaccaccatcttctgtacctatgatgccgatacgctgagtaaagatccggctgacgggcgtaaagtgaaaggcgtaatccactgggttagcgcagcacatgcgttgccgattgaaattcgtctctacgaccgtctgttcagcgtgccgaatccaggtgccgcggaggacttcctgtctgttatcaaccccgaatcattagtgattaagcagggttatggtgagccgtcgctgaaagcggcggtagcaggaaaagctttccagtttgaacgtgaaggctacttctgcctcgacagccgctatgcaacggccgataagctggtctttaaccgcaccgtgggcctgcgtgatacctgggcgaaagcgggcgagtaagcactgcgccaacagacgaatgctgtaaaaataccttgtcaacgccgcgttttgcggcgttttttctctgcatttccaagagcctatcccattagggctattttacttgccattttggacctgggcagtgctcgccaaaacgcgttagcgttttgaacgccgctagcggcggcccgaagggcgagcgtagcgagtcaaacctcacgtactacgtgtacgctccggtttttgcgcgctgtccgtgtccaaactggctgcgccaataacgcctggtgggataggctctaagtcgattctcttttttgcgaggcgaattaattattctctgaaaattattgatctgataaatgattattaatctaaatgttataagcgtcaggtcaacaggagacaattattttcatgcctatggaaaacaagtcaattttctttctggcggtctgcttcccccaccagcagtcgaatgtaacagaaagcaattaaatatgtgcggttgctcatattattacatactggttacagaaagagattgataattcgcatcgcgaaaaatagtctatttaacgtagtaaatgaggtttctcagcgctactttttatttttattttttcgctgttcgcttttgtcggcagcaatttatacgtcaaagaggattaacttatgcgtacgtttagtggcaaacgtagtacgctggctctggctatcgccggtatcacagcaatgtcggggtggatcgttgttccgcaggcgcaagcctccggctttttcgacgactccacgttaacgggcggcatctattattggcagcgtgaacgcgatcgcaaagatgtgaccgacggcgacaaatataaaactaacctttctcatgcgacctggaacgctaacctggattttcagtctggttacgctgcggatatgttcggtctggatatcgcggcgtttaccgcgattgaaatggcagaaaacggcgacagcggtcatccaaacgaaattgccttctcgaaaaagaataaaggctacgacgaagactattccggcgataagagcggtatcagtctttataaagccgccgcgaaatttaaatatggcccggtctgggcgcgcgccggttatattcagcctaccggtcagacgctgttagcgccgcactggagttttatgccgggtacttatcagggtgcggaagccggcgccagttttgactatggcgatgcgggcgcgttaagtttttcctacatgtggactaacgaatataaagcgccgtggcataccgaaatggataagttttatcaggcggataaaaaaactaatgtggactacctccactccatcggcgcgaagtacgacttcaaaaatgatctggtgctggaagcggcgtttggtcagtccgaaggctatgtcgatcaatatttcgcaaaggccagctataaatttgatttaggcggcaatccgttcaccaccagttaccagttctacggcgcgcgcgacaaagtagacgatcgcagcgtgaatgatatttacgacggtacggcctggctgcaggcgttgaccttcggctacaaagtcgcggaagtggttgacctgcgtctggaaggcacctgggtgaaagcggacggtcagcagggctattttctgcaacgtatgacgccaacctacgcctcttcaaacggtcgtctggatatctggtgggataaccgctccgactttaacgctaacggtgaaaaggcggttttcttcggcgcgatgtatgacctgaaaaactggaatctgccgggctgggctgtgggcgcgtcttacgtttacgcttgggatgctaaaccggcaacctggcaaagtaacccggatgcttactacgacaaaaaccgcactatcgaagagtcctcatacagtctggatgcggtctataccctgcaggaggggcgtgccaaaggcaccatgttcaaactgcacttcaccgaatatgacaaccactccaatattccaagctggggcggtggttacggcaacatcttccaggatgaacgtgacgtgaaatttatcgttattgcgccattcactattttctgatgtcagatgcggcaggctgccggtctgccgcgctgttgaggaacgacctatgaaaaaaattttactcatcgccagcatgaccgccggtttgacggcctgcgcgtcatcacccgcgccggaagaagatagccggctgaaagaggcgtacagcgcctgtatcaataccgcacagggctcgcctgagaagatagaggcctgccaaagcgtactgaatgtccttaaaaaagaccgcaaacatcagcaatttgctaacgaagaaagcgtgcgggtactggactatcagcagtgcattcaggcgacgcgcacgggtaacgatcaggcggtcaaggctgactgcgacaaggtctggcaggaaattcgcagtcataataacgtgcaataaaaacctgccttgccacccacgggcgaatgttttccgcccgtggttttttcaggctttattttctgccgcgatatagccgcgactcagacgtacaaacagcatcgccgtcgcggcaagtccacataatgccgcgcacatcagccaccagccgggcgagcttttgtcgccggttaactttaccagcgcggtagagatggccggcgtcaggccgccaaaaatcgccgtcgccaggctaaaggccagcgagaaaccaacggtacgcacatagactggcatcacttcggttaacgccgcgaccattgcgccgttatacatgccaaaaaagaaagagaaccacagcagtaccagcgtcatgcgggtaaagtcgggcgcggcggtcagccattgcatgacgggccaggtggtgatcagcgccagcaacgtaatgcccattaatacggcgcgacggccaatccggtcggaaatcgcgccgccaatgggtaaccagataaaattggacacccccaccaacatggtgacgatcaaactgtcccgcgcgctgagattaagcacggttctgccataggtcggcgtataaacggtgataaaataaaacgttgtggtggtcatcgccaccagcagcgttccggccgtaataatgcgccagtttttggcgatagttgcaaaaatttccctggtgtcggggcgatgcttgcgttgtaaaaacgcctctgtttcttgtaatgaacgacgtaaaacaaaaatcagcggaatgatcatacagccgataaagaacggaattcgccagccccactccgatatcgcgtcgtgtcccagcgtgatattcaggctataaccaatcaacgcggcaacaacgatcgcgacctgctgactggcggattgccagctggtataaaaccctttattgcctggcgttgcgatttcggacagatagaccgagacgccgcctaactcaacgcccgcagaaaatccttgtaataaccggcccaacagcaccaacgcaggcgctgccaggccgatcgtttggtagccggggacgagggcgatgagcaacgtaccgcagcccataatcgccagtgtcaccatcagccctttacggcgtccgattctgtcaatataggcgccaagcacaatcgcgccgacggggcgcattaaaaaaccggagccaaagacggcaaaggtcaacattaatgaggcaaattcgctttccgccggaaaaaacgttctggcgatataggtggcgtaaaatccgaacaagaaaaaatcaaactgttcaagaaaattgccgcttgtcacgcgcagtattgcgccgaacgtgccggcgcgcgatgttgcaggtgtgtgttgtgccatagggtttgctctccactgtctttattgttttatgggtaagatgttgcgggtcagttgcctgtatcccccgcatgttttccgcgtcgcttctcaactgcccatttgagtaaggccgcgcagcggaaaaatccgtgggcgaattttccgtagggaagggtgagaaagagcgccatcaccacgcctaaatggagcgccagcagtatgcccattccgctggtgtctctgcctgccagcagcgccagcccggtcagactggttaagaacagcagcagaataaagccgcgatccatgggtttctggcgcgcatcgccatgtaacggcgaccgccgcagattgagccacagtagcccggccgggccgataagcagaccgataccgcccagcgtgccgagcatgaccggcaggctaaaaaacgggtagggcgcttcccaaccggcgacgtagtgatagcccgtcgccacgaccgtggcggcaaaacagagcataaaaccgtaaaaggtaaagtgatgaaagcgacggcgcagcagcgtgaacgcatcgtccgcttcgttacagcctttgccgtgaccgccgtcgagatatttcagcgttaacgcattgtgcgacgcttccgcaatctctgccgaacgcggtacgcccggcgagatctcacgccagaagcgaattacgcccgccataagcaaaccgattgccagcacaaaaactgagccaaacatccatgccagcaggctatgcggaaaaatttgatagaagtcaccggccagcggcggatgaatcagcgaccctttcagcgccatcgccagtaataaaaagagcgtcagaccgactatcagcgccagcgcgacggtgatccccgcccggcggtataacgcgccaaaagcggcgggctgggcatactgttgatacgtctccaggcgggcttgcgccatcgctttcggcacgttaatggcaaattcatggggcggcgcatactggcatgcgtgcaggcaggcgccgcagttatgacataaattcgccagataatgaatatcggctttaccgaattcgagccgctgggtcatcgccggaaataccgcgcaaaaaccttcgcagtagcgacacgcgttacacacttgcatgacgcgttcgacctcggcttccggttcggtaagcacggtggcctcaatgattaatttttcaagctgtttcatgctgcgcctccttgtgcgccgcgcgggcggcttctattcccgcaatgcggccaaaggttgtgccgatagacatgcctacgcctgcggtataccccttgcccagtacatttcctgccatcatctcgccggcaacaaacaggttgcggcttggatgaccggcaaaatgcaccgcggcacgttcattgactttcagacccaggtaggtaaacgtgatgccgggtcgcagcgcataaccgtagtagggcggcgcatcaagcgggcgcgcccagtgggttttcgccggcgtcaggtttttagtggcgcagtcatcaagcaaggtatgatcaaaatgaccgggctggcaggcctggttatactgcgtgacggtatgggtaaatttttccgcgtccagccccaactggcaggccagctcagccagcgtattggcctgcgcgccaggaaaaaccggcggcataaagtggccgatggctttgctgtcaataatcgaatagccaatttgtcctggctgttgagccaccagccgcccccaaatggcgtaacgcttcggccagaaatcttcgccttcatcataaaaacgttcggcgtcgcgattcacgacaatacccagcgatacgcaatccacgcgagtacaaataccgccgtcgtacagcggcgccctggcatcaatcgctacgcagtgcgactgggacggatcgccaatgatatccgcgccggcatccatcataaatttgagtaatacgccctggttaaaacgcgtgccgcgaatcaggaaattatccgcgggccattcgccgcgggcgttttctccccaggcctcccgcagccattcacggtttgattcgaaaccgccagccgctaatacgcaggctttggcggtaatccgttcgctacccgccagcgccgccacgaattcgccgtcatgaagttcaagcgcgtgaaccggcgtgttatagcgaacctgtacgcccagccgttcggcgctacggtaataggcattgacgagcgctttcccgccgcccataaaaaacgcattggtgcgcgcaacgtggagcgcacctgatagcggcggttgaaagttaacgccatgtttgcgcatccagtcgcggcattgcgaagaggtgcgaatgaccagccgcgccagcgcctcgttggtgttgccgtcggtgactcgccacagatcctgccagaattcctcttcaggatagctttctaccagcacatcctgcggcgcatcatgcatacagcgcaggtttcgtgtgtgctgagaatttccgccgcgccattcccgcggggcagcctccagcagcagaaccgatgcgcccgcttcccgtgcggtcagggcggcgcataatgcggcattgcctccacctatcaccagtacatcaaccatcttatactcccgtaccatttaactatttgttaaatttgtaattgaaatgtatacggataaataagcggcgcgctatcaggtagcgctaaacaggggtttagtaagcgtaaagggttgcgcctggccattcaccggcgtcgactaactgacgcataactttggtaaggactactctggcggcaaggccggcgggcgtcagttcatcatccgacaggctgactaaaaaattggggcggctgagtaccggattatggacgccgatcacgcgtagcgcgtcgttatccagatgagaaatcgccgcgccgggctgcaacgtggcgccaagaccgtcgcgcacggcgcgcatcaacaacgccagaccgtcaatttccgcgacgatctcaacgttaagcgcatgttcctggcagacagcgtccagcctgccgcgcagcccatgtccctggcttggcataatgagcggaatgcctgccagttgttcaggtgtgatcgggttatcaggaagcgccgccagcagggcatgggagccaatcagaaaaagctgttcttcaaggatcggtctggcgctccagcgcaggattttatctttttgaaagacaacggctaaatcaatctggcgggtattgatcattctttccagattaccggacaagctttccaccacatgcagtcgaacatcggcatagttttcctgcatggcatggataaacggtatacccagtatggaggcggtactgggggccattcctacgctcacatgaccggaaaggcgcgcttctctggcggcgagaattgcgtcgtcggcatgacgcagggcgagttgcgcctgcgaataaaaggccagcccggcgttggttggcgttacgccgcgcgaagtgcgctgcagcagacggatggcaagctcgttttccagacgggacatctgttgacttaatgctgaaacgccaatatcaagatcctgtgcggcgctgcccatactgccggtttcaataatacgcacgaaatagcgtaactggcgaagctccattcctgctctcctgagatgcgatagcgttttttacattaaatcaacatcaagcggcaggaaagaggaggatataaaaaagccaaccgggcggttggctcttcgaaagatttacacttatttagtcacgtcatcgtgcgcgtgctcgtcttcgcggcagtcgccttcagcgcagtggccgtaaagatagaggctgtgattagttaaacgaataccgtgtttcgccgcaatttcacgctggcgcgcttcaatagagtcatcactaaattcaatcacttttccgcagtcaaggcagataagatggtcgtgatgatgctgttgcgtcagttcaaaaacggatttaccgccttcaaaattatggcgggtcacgataccggcatcgtcaaactggttcagcacacggtatacggttgccagaccgatttcttcacccatgtcgatcaggcgtttgtataaatcttccgcactgacgtgatggttatctggttcctgaagaacttccagaatttttaaacgaggaagcgttactttcaggccagccttctttaatgcggtattgttgtcagtcatgcggaatctgtcctgttgctaagcgattcacttcattagagaagtgacagaaattgcactcaagataatgcgtatcattataggactgccatgccgaaatgaaaaccgcaagtctctcgcagatgttaataaaactgtggttttgcctgcaaattctggcgccacctgattacacccggacattgtacagggatgggtgcgaaagttacaaatttgtagcaattattttgattggtcttgtctattgatgcggcgcagatataacgctgcgccgcataagattaggcgttgaggatgtcgtcgaggtgcaattcagccgaaacttgcttaacccatttttcaacacgctcggcggtcagttcaggctgacggtcttcgtcaatcgccagaccgacaaaatgatcgtcgtcagccagacctttagaggcttcaaaatgatagcctgcagttggccagtgacccacaatcgtggcgccgcgcggctcaataatgtcgcgaatcgtgcccagcgcatcacagaagtattccgcgtagtcttcctgatcgccacagccaaacagcgccaccagcttaccgttaaagtcaatctcttcgagagtcgggaagaagtcatcccagtcacattgcgcttcgccatagtaccaggttgggatgcccagcagcagaatgtcatacccttccaggtcttctttactgctttttgcaatgtcatgcacatcggcaacgtctttaccaagctgtttttgaatcatttttgcgatattttcggtattaccggtgtcgctgccgaaaaagatgccagtgattgccatgagtaaaataacctcttgaaacttattgaaatggtggtggcgaattgcccacggataagggcaatcatagcagaacaggcagatatgcggaaacagcaatcacgcgggactgcacgctctgctacacgaaatatgaaacaaaacttattttcagactaaaccctggccgcgcagcgccataagctgcttcattaatatttcttcaatgagctcgctgcggctaatgttgcgcgcttcggccagctcattcagcgcgtcaaccgcttgtgcgttgagttttaattcgacacgcttgaggccacgaactttgtcgcgttttaactggttgcgcttgttgatgcgtaactgttcatcgcgcgaaagcggattcgttttaggtcgtcccgggcgacgctcgtgcgcgaacagatctaatgtcgtacggtccgtttgttctttggccatgattttggtgacttcgggggaaacaatcagccaggcttatgcccggatggatagcgcgccatcatacatcagcgaggaagcgacgccaacgcccgcgcgcgtaatcgcgcacaggcgatgagtttttaatcagttagcgtttatcgtgcagataacggcggatggcgcgcagaaccgcctctggtttttcggcatgtacccagtggcccgcgccggcgatcacatgcgcgcgcgccaaagggaattgcgccagcagcgcgtcgcggtacgcttcggtcacgtacggcgagttaccgcctggaataaacagcgccggatgttcccagggcggaatggtttcccagccgacgatatgcggatactgctcccataataccggaacattaaaacgccattcgccttcagcccaggattttaacagaaactggatcacgccttcttcgttgaggtgttggcgcataatccctgccgcctgttggcgggatgtcgcgtcggattcgctgacggcattaatggccgcgaaaatgcgatcgtggcggcgaacgtgataatccacgggggcgatatcaatcgcgaccagacgatcgatgcgatcgggcgccagcgccgtcagcgccattaccgcttttccgcccatggaatgaccaataaacgtcgctttttcaatctgctgcgcgtcaagcgtatccagaagatcctgggccattgccggataatccatgaccggatcgcgcggcgataaaccatgattgcgcatatcgacctgaataatgtcgtgatcggtcaccagatcgcgcgccagtacgccgaggttgtccaggctgccaaacagaccatgaacgagaacgatgggggaattattgtgcaggttttgtgcagattgcgctcggatgtttaatttcatggcaaagttctttttttcgctctgtcgggttagggtattatgttgaccattctgccactgggctgcaacctctaaggtttactccgagtttttttgtcagccgggcttaacgctatccgctgttgggatttgttcctataatcccaatgacttgtattcagcaaagacatcgcactggattaagatgaaaacgattgaagttgatgatgaactctatagctatattgccagccacaccaagcatatcggcgagagcgcatccgacattttacggcgtatgttgaagttttccgccacgacacagccaacggcttcagcggtgaaggggacgcctgcggcgcaacccgttgccgaagcgaaaccggttaacccggtaaaagacaaagttcgcgcgatgcgtgagctgttgttgtctgacgaatatgccgagcagaaaaaagcggtcaaccgctttatgctgattctgactacactctattcactggatcaccacgcgtttgcggaggcgacggagtcgttgcatggccgcacgcgcgtctattttgcggcggatgaacaaacgctgctgaaaaatgggaatcaaactaaacctaagcacgttcccggcacgccgtactgggtgatcaccaacaccaacaccggccgtaaatgcagcatgatcgaacacatcatgcagtcaatgcaattcccggcggaattgattgaaaaggtttgcggaacaatttaatccttgcattagaaggaccaggcaatggcaatccacaaccgcgcaggacaacccgcgcaacagagtgatttgattaacgtcgcccaactgacggcgcagtattatgtactgaaaccggaggcagggaatgcagaacatgccgtgaaatttggcacttccggccatcgcggtagcgcaggtcgtcacagtttcaacgaaccgcatattctggcgatcgcccaggcgattgctgaagagcgggcgaaaaatggcattaccggcccctgctatgtggggaaagacacccatgcgctctcggaaccggccttcatttccgtgctggaagtgctggcggcaaacggcgtagacgttatcgtgcaggaaaataatggctttacgccaacgcctgccgtgtcaaatgctatcctggtccataacaaaaaaggcggcccgctggctgatggtattgtcattacgccgtcgcacaacccgccggaagatggcggtattaaatataatccgcccaatggcggcccggcggataccaacgtcactaaagtggtagaagatcgtgccaatgcgctgctggcgggcggcctgcaaggcgttaagcgcatctctctggatgcggcaatggcctcgggccacgttaaagcggtagatctggtacagccgtttgtcgaagggctggcggatatcgttgatatagcggcgattcagaaagccggtctgacgctgggtgtcgatccgctgggcggctccggtattgaatactggaaacgtatcgctgagcattacaaacttaacctgacgttagttaacgatcaggttgatcaaaccttccgctttatgcaccttgataaagatggcgcgatccgtatggattgctcctccgaatgtgcgatggcgggtttgctggcgctgcgtgacaagtttgacctggccttcgccaacgacccggactacgaccgtcatggcatcgtgacgcctgcagggctgatgaacccgaaccattatctggcggtcgccattaactatctgttccagcatcgtccgctgtggggcaaagacgtggctgtcggtaaaacgctggtctcttccgcgatgattgaccgcgtggtgaatgatttgggacgcaagctggtagaagtgccggttggcttcaaatggtttgttgacggtttgttcgacggcagctttggtttcggcggggaagagagcgcgggcgcttcgttcctgcgtttcgacggtacgccgtggtctaccgataaagacgggatcatcatgtgcctgctggcggcggaaatcaccgccgttaccgggaaaaacccgcaagagcattacaatgaactggcagcgcgttttggcgcgccgagctataaccgtctgcaggcggcagcgacctcggcccagaaagcggcattgtctaaactgtctccggaaatggtgagcgccagcacgctggcaggcgacccgattaccgcgcgtcttaccgcagcgccgggtaatggcgcatcgattggcggcctgaaggtaatgaccgacaacggctggttcgccgcgcgtccatccggtacggaagacgcttacaagatctattgcgaaagcttcctgggggaagaacatcgcaagcagattgagaaagaagccgttgaaatcgttagcgaagtattgaaaaacgcctgatgggcgatatggaagaaaaaggagccttacggctccttttttgtattaacggcgctgcgcttatcaggcctgtaaaccgcctccaggccggataaggcgcttgtgatatctgacttattcgctctgagtcgccagatgtcggcggcaggtgagggcgtcgcattcaatacgcaccacgcaaaccgctttcatcatatcttcccgataactgaaggtttttcccggatcggtctgacgcataatgacgtccaggccgtagcgcatctcctcgcgtgtttgcaatatcgatgccagtccggtggcgaaaacgctggtgtaggcgtagctataatcacaggggtcatcggcacgtagtaatgcatggtcgccgtccatttcaatgcatactgccgggttcttacgtaacagacgcatctttttcccggtgcgtgcgccgtgaaaataaaatatccagcgtccgttctgatactcgtagccaaaatttacggggacaacatacggacagagattgtcgttaaaccctatccgacacacttcgtgtttactgagaatagccagtatttctgctatatcagtgacttcccgttctggattactcatttctattatcttattcaaagagtgaaaatgcccggactaccgttaccgcagcccgggcgcgccatcagccgtgtttatttttcaattcaaaacgcggtgagaccaggccgtataacgtccagccgaggaaggtcacaattgagccgtacagcatggcttcttcaccggaggaatagagcgcgtagaagctatacatggcgccaacgaaggccacgaagttagcgactttcgcttttgatgacggcacattcgccattttctgaatgataaccagcgcggccatcgacagaatatacggaataatgttcgtcaccaccgccaggttaaccaggacgttaaactgactattcagcgacgggctaatggtcatcagcgacaggccagtctgaataatcacaataatcagcatcccctgtaccggcgcgtcgactttcgttacacgagagaagactttcgggaaatagccttcgtcagcggaggatttaaatacctgggcgatagtgaactgccagcccagcagcgagccgcagcaggacattaccatcagcgccatgatcactttacctaccgcaggcgtgaacatctgtgcaaacgccagaccaaacggcgccgtggagttcgccagatccatgttcggcacaatcccggcaatcacgttagtcgaaacgatatagatgaccgccgcgcccagcgtaccgcccagtaccgcgatggggacgttcttttccggattctcgaccacgtctgcgttggcgcaggcggattccagtccaagaaatgcccataacgtcatggcgatggaagaaccgaccgcgctaaagaacggaacatggtgcgggttccatgacgctacgtacatgctggggctaaaccagaaccagccaatgatgcacaggccgacaaccggaatgatgacgccccaaacggtaacgctactgatctgtccggtaatacgcgcgccgccaaagtttgcgatggtacaaacccacaatacggcgatagtcgccagaccgatctggagcggcgtcagcgcggcgccgaacagttcggtaccatagccgacagcggagatggcgatagccacgttggcgatcagcagcgagacgccgtaggtatagttcgccataaagttgccggatttaccgaaggcatattcggcgtaaccgcccatgccgccggatttacggctaaacataccgcatttcgcaaacgcccaggccagtgccatcgagccgacggcggtgaccagccaggagataatggatatcgtgccgacttcagacagtttggtcggtagcatgatgatcccggagcccatcatgttgaccatagtcagaattgtgagctgcacgacacccattttattggatttaggtttactcataatttttcctccttcagcagggagcgctgcgcgtcacgaggtttaatgacgtagcaccagacctgcttacggccgtcgtgttcttcgatataaacgccctgcagttcaggcgcaaagcccggcagcaggttgatcccttcttccagggcgctgaagtaacgcaggacagaaccgccccagatttcacccggaactacacacagcactcccggcgggtaaggcagagcgccttcagccgcgatacgaccttccgcttccggcaggcgaaccagttcgacctcgccgcgcagataggcatagttggcctcttgcggattcatactgactttcgggaaatgcgatttacggaacatctctttttgcagctgtttcacgttgtgccgcgcatagagatcgtgcatctcctggcaaagctgacgcagggtatagccggcataacgcgcttcatgctgtttgtagatggacggtaatacttccgctaacggcgcatcagcttccagcagtttttcgaaacgagccagcagggcgacaagctgttgtaacttcgccatgtcttctgccggcgtcagcaggaacagaatggagttgaggtcgcatttttccggcacaacgccgttctcgcgcaggaagttggcgaggatcgtggcaggaacgccaaagtcttcatattcgccgctcgctgcattaatgcccggtgtggtgagcagcagtttgcaagggtcgacaaagtactgatgttcggcatagccttcaaacgcatgccagtgttctcccggaacgaagtggaagaagcgcagatcgctggcgatctctgacgtcgggtatgactgccacggcttaccatcaatcagttccggtacgaacggacggatgtgatgacagttttcgaggatcaatttacgggcatcgatgccgttaaccacgcaatccatccacatattgcgaccgctgacgccttcgtgcattttggcgttaacgtccagcgcagcgaacagcggatagaacgggctggtggaggcgtgcatcataaaggcgttgttcatgcgcttatgcggaacgtagcgcgattgccctttgatatggctatcttttttatggatctgcgaggtctgggagaaaccggcttgttgtttgtgaacggactgcgtcaccagaatacccggatcgttttcgttcagttccagcagcagcggcgaacaatcggccatcatcggaataaattgttcatagccgacccaggcggagtcaaacaggatgtagtcgcacagatgaccaattttatcgacgacctgacgggcgttataaatggtaccgtcgtaggtgcctaactggatgacggccagacggaatggacgtgcttcgcgggcacgctgcggcgcgacttcgctaatcagctcgcgcaggtaatcttcttcgaagcagtgagcgtcgatcccgccgataaaaccatacgggttacgcgcggtttccagataaactggcgttgcgcccgcctgcaataatgcgccgtggtggttagatttgtggttgttacggtcaaacagtaccagatcgcccggcgttaacagcgcgttgagtacgactttgttagaggaggaggtcccgttcagcacaaagtaggtcttatcggcgttaaagactttcgccgcatgttgctgcgcaatgcaaggcgcgccttcgtgaatcagcagatcgcccatcgccacgtccgcgttgcataggtcggagcggaagagcgtttcgccaaagtattccacgaactgattaccggcaggatgacggcggaagaattcgccgccctgatgtcccgggcagtcaaatgcgctgttgccctggttgacataatccaccagcgcgcggaaaaacggcggacgtaactgcgtttcgtagtggcttgctgcggtttccaactggcgaccatagaaggcagtacgggattcattatattcgaatacaccagagatacgcggcaaatactcaggcggtacgcgcccttcgtcatgagtcgcaacaaacacgggaataccgtaacccgttgcgtcgatttcatcgagttttccgtgttcaatgtcgtcgatggataacacgatggcagccacgtcgatgaaacgactctcatcaacatttacaatattacggtgtgtagaaaaacaatccgggcaatgacggctaacggcaatttttaattctgacatttttcatctctttatttcaggtaatagcaggccctcaatttctcgcatgagaaactgattcttccggaaaaaatcaaagctatcccgctgataaaaaaatcagtaaattagctttattttagatgtaataaatcccaacccgtccggttgcaggaaattcaggatttaaggagttgagtactacgatatacaggcagaaaccgcgataactaaaattgcgctgagtcggaatttcttctgtcaaactatatagttagctggcttggtgtaaaagaattaccgtactgtcgcttttaacaattcgagttatttaggcaatagacctgaatgacataagggtcggaaagacctgtatgctgaagtacccgtagcagaaaaactaccgggcattaaagaaatgaaagtcgaaactattacggtgggcaaacatcataatatgcgttgtccgccttatatggggcataaaacgattattattttccattttgaggtcctttcattgatttattgaaagcatggatattttatccaggaagtgccagcaatctgtgaaccagatcaacaaaaaacgatcatttgaaaaataattagtcggcgattatgcatatcgtgctgtgaaataacggattgtttcttaaatgttaattatatgttttttatatcctctataaaatataatatcgccgcgaaaataattattcgcgacgccgaaaataaatgacataaaaattagaagttatttaaaaataatgaatagctattcacggcataaagcgatagccaattccggtttcggtaataaaatggcgtgggcgggtgggatcttgttccagtttctggcgtaaatgtcccatatagatgcgcaaatagtggctatgctccacggcgttaggcccccagacctggtttaataactgccgttgggttaatactttgccggtattattgagtaataccgccagcaggcggaactcaatcggcgtcagatggatttcttcgtcgccacggtggatcaaccgtgcggcgagatcgaccgtcacgccggaaaaacggacgatcggatcggcgctagggctggcggcgtgccgtcgcagcgcgacacgcaaacgcgcctgcaactcgccaatgccgaatggcttgctcaggtaatcatcagctccggcgtcaagcgcggcaatcttatcgctttcttcgctgcgggcggaaaggacaatcaccggtattgcgctccactgacgcaggtcgcgaatgaaatcgattccgtcgccgtccggcaggccgagatcgagaataatcagatcgggctttcgcgtggcggcttccagtaaaccacgttgtaatgtttcagcttcatacacgcgcaggccgtcgccttccagcgcggcgcgcagaaagcggcggatggcctgttcatcttcaacaatcagaacgtttgtcacatatcctcatgaaaatcgtcaagttcaggtggttttccttgcggcagcgtaacacggaaacaggcgccgccctgcggtcgattataggcggtaagcgtgccgccgtgtacctctacgatagcatggcaaatcgccagccccagccccacgccggggacggcggactctttgttgccgcgggcgaacttatcgaaaatcttctgttcttgccccgcaggaatacccggcccgttatcccagacatccagttgtaaacgatcgtccttaaccgcagcatcaatgccgatactggcctgcggcccggcgtacttaacggcgttttccagcaagttgatcaggacgcgctcaaataaggggccatcgacatggataagcgttaactgttgcggcagcgacaatgtaatcggatgcaataaacccggctctaacatctgtaacgcgctcccgacgacctcttccagcgtcagccactcttttttaagattaaacccgccggactgaatacgcgccatatccagcaaattattcaccagccgggtggtgttgagaatatgctggcggatttcactggcctgacgcgcgtggggcgatcctgcgctggctaaatccagcgtcaaaatttccgcctggccgaacaataccgtcagcggcgtgcgtaaatcatgcgacagtgccgccagcagagcgttgcgaatactttcgcgctcgctggcgagacgcgcctgttcttcgctggcggtcagcgtcagtcgttccagcgcgttggcgacaagcagagtaaatgtttccagcaggcgttgctgctccggcaccattaactgacgcaaattacccggttcgacgatagccagaccgtacgttttatcggcgcttttcagcggcaggatttgataaggcacgccagggagggtatcggtgcctgcgccggcaggctggcctttatcaaaactccagcgcgcaattgcgtcgtcccacggcgtcatgccttgctggtgggtgagaggcagcaacttaccgttagcatcaggtaataaaatttggctgcgcgcctgaaacgtcgaggcgataaaccgctcgctggtcgcggcgatatcatgttcactacgcccgacggccagcgctttagacatttcatataaatgacgggtacgctgttcccgataacgggcgacgcgcgcttgatagcgcaccccggcagtaagattgccaatcaccagaccaaccgtcagcatcacggcaaaagtcagcagatactgcacgtccgaaacggcgagcgtaccgcgtggcgcgataaaaaagagatcgaaactcgccacgttaatcaccgtcgccaccaccgacggccagcgcccgtaaagcagcgcaatcaccactacgcccagcaaatagagcatcaccagattggcggcgtcgaaggtgacaagccactgcatagcgataagcgtggtgatggcgcaaagcgccacggcgaccagacagccctgaatctgcccacgccatttctctttaaaaggacggttatcaggcgtttgcgccaatgcgcgggctggcggctcttccagcgcgacgatcacctgatcgagatccggcgcgcgcctggcaagacggtcggcgaaagcgtcacgtcgccaccagcgtcgcgacgccgggcggcccatgacgattttccccagattatgctcgcgggcatagcgcacgaccgctttctcttcggcgggatcggacagggtggcggtttccgcgccaagctcctgcgccaggcgcagcgcgcttaaaatagcccgccgttgtttttccggtaagcggtgtaacgttggcgtttcgacatagacggcgtgccagacgctgccgagccgggaggccagacgcgccgcggtacgcaccagtttttcgctgccggtgttatgcccgatacacagtaaaatcgcatcgcgggtgtgccatactttttcttcgcccggatgcgcgcgccaggcgcgcatctgatcgtccacgcgatcggctgtccggcgtagcgccagctcgcggagggcgatcagattgcccttgcggaaaaaatgttcaatagcgcgttccgcctgaccggcgatatacactttaccttcgttgagccgttggcgcagatcgtcgggcggcagatcgaccagtacgacttcatcagcggcatcaaaaaagggatcggggacggtttcgcgcacctgaatccccgtgacgccgctcaccacatcgttcagactttccagatgttgtacgttcacggtggtgaaaacgtcgattcccgcttccagcagctcttcaatatcctgccagcgcttaggatggcgtgagccaggcgcgttactgtgcgccagctcatccattaaaatcagcgccggacgccgggcgagggcggcatccaggtcaaattcgcgaatttgccgcccccggtgcgagtgacgttttggcggcagaatggtcagcccgtcaagtagtgcggcggtctcttcacggccgtgcgtctctaccacgccgatcaccacatccagcccctgcgctcgcagccgctgcgcttgcgccagcatcgcccaggtttttccgacgcctgcgcaggcgccgaagaaaattttcaacttcccccggtggggcgggggcgtttgttccaacaagcgatccggatcaggacgcaagggttcgtcgttcatttcgctctgtgtccctgtagcgcatccagcgccagattaagctcaacaatattcaccaccggttgcccaagaaagcgcgccagcggcctgtgcgtatattctgcaaccagttgcgcgacctgttcaacgggaagctggcgagccgccgccacgcgggggatttgccatgccgcggcgccgggcgtcagattattatccagcccgcttgccgaggccgtcgccagctcaaccggaaccgcggaactcgcctgggggttagcggcgcgtagcgcggcgacgcgggactgtatttgcgcatccagttcgggattgctggcggccaggttgcttccgcccgacgccagtggattataaggcgtatcggcggtggcggagggccggccatgaaaataacccgcggcggtaaacgattgtccgataagcgctgagccgcgtatcacattgtctttatgaatcagcgagccattagcctgccagggaaaccaccactgccccagcgccgtggtcagaagcggatacacgccgccggtcaataacagcagaaataacattgtcgaaaaagcaggacgtaaaccgatcatcatacacctcacgccagacccagcagggtcagcagcacatcaatcactttgataccaataaacggcaccaccagaccacccagaccatagatccataaattacggcgcagcatggccgatgcggaaagcggcttataactcacgccttttaatgccagcgggatcagaaaaataataatcagggcgttaaagatcaccgcgctcagaatggcggagttcggcgaatgcagccccatcacgttgagcgcgtttagctgcggataggtagcggcaaacgcggcgggaataatggcgaaatatttcgctacatcattcgcgatactgaaggtggtgagcgagccgcgcgtcatcagcatctgcttaccgatatgcaccacttcaatcaacttggttgggttagagtccagatccaccatattaccggcttctttcgccgcctgggtgccggagttcatcgccaccgcgacgtcagcctgcgccagcgccggggcatcgttagtgccgtcgccggtcatggcgaccagccgtccttccgcctgatattgacggatcagcgccagcttggcttccggcgtggcttcggcaagaaaatcgtccacaccggcttcggcggcaatcgctgccgccgtcaggcggttatcgccagtgatcatcaccgttttaatacccatctttcgcagctgggcgaaacgttctttaataccgcctttaacgatatccttgagggcgataacacccagtacgcgcgcgccctccacgaccaccagcggcgtcgcgcccaggcgcgccacgttctcgacgttttgctcgacatcggcgggaaaatggccgccattgctctcgacatgacgccgaatcgcgtccaccgagcctttacggatcatccggttatcgatattaatcccgctcatgcggctttgtgcggtaaacggaacaaaggtggcatgaagcgactgcacatcgcgttcacgcaggttaaagcgctgtttggcgaggatcacaatgctgcgaccttccggcgtttcgtcggccagcgaagcgagctgcgcggcgtcagccagcgtgcgttcgtccacccctcgggcgggtataaaatcggacgcctggcggttgccgagcgtgatagtgccggttttatccagcagtagcacgtcgacatcgcccgcggcttctacggcgcggccgctggtggcgatgacgttcgcgcccaacattcggctcattccggctacgccaatggcggagagtagcccgccgatggtggtggggatcaggcacaccagcaacgccaccaacacggtgacgctgaccgcattaccgccccaggcggagaagggccacagggtggcggtcgccagtaaaaagacaatggtcagggcgatgagcaaaatcgtcagggcaatctcgttaggcgttttccgccgctgcgcgccttccaccatcgcgatcatccggtcaagaaaggtttcgccaggattgacgctacaggcaatcaccagccagtcggaaagaattcgcgtgccgccggtgacagaggcgaaatcgccgccggactcgcggatcaccggggcggattcgccggtaatcgcactttcatccaccgacgcgccgccttcgatgacctcgccgtcgcagggaataatatcgcccgctttgaccaggacaatgtcgccttttcgcagttcagcggcgggcacgttatcggcctgcgcatcatggcgcggggcgcgcagccgacgagcgaacgcggtctttttcacccctttcagactgtttgcctgggctttgctgcggccttccgccagcgcttcggcaaaattggcgaacagtacggtgaaccataaccacaggctgataatccctgtaaacaaggcgcttcccgctatttgtcctgttaccatagcgagcgttaacagagtggttagcacgctgccggcccagaccacaaacatcaccgggttacgccactgggcgcgtgggcttaatttttttacggcatccgttagcgcctgtacgagtaaaacaggttcaaacagcgccagttgcttgcgactcatatcaatgtactccgcatcgctcaaggtaaagagaaatgttccgctaccgggccaagcgccagggcaggaataaacgtcagcgcgccgaccagcagtaccgtgccgatgagcagcccaataaatagcgcgccgtgggtcgccagcgttccctgactggccggctgtacttttttactgaccagcgatccggcgatggccatgacaggaataatcacgccgaaacggccgacgaacatgcagaacgccagcaaacagttccagaaaggcgagttagcgctcagacccgcaaaggcgctaccgttgttgttggcggcagaggagacggcatatagcacttcgctaaaaccgtgcgggccagggttcagcattgcgctgcgtccggcatccgtcatcatcgccagcgccgaacccaacaagaccaacatcggcgtgaccagaatcgccagcgcggtcattttcatttcgcgcacgtcgatttttttccccagatattccggcgtgcgaccgatcatcagccccgcgataaacaccgccagcaggacaaacagcaacatgccatacaggcctgaaccgacgccgccaaagaccacttcgccaatttgcatcagccacatcggcaccataccgcccagagcggtaaacgagtcgtgcatggcatttaccgccccgcaggacgccgcggtcgtgacgacggcaaacaggctgctggccagcacgccaaagcgcgtttctttaccctccatgttgacgctactgtccgcgcccgccgccaacagatgtggatttccctgaacttccgcccacatcactaccgctacgcagaccacaaaaatgaatgacattgcccacagtagcgcgcgtccctgacggcgatcgcccgccgcttcgccaaaggcgaaacagagcgcggctggaatcaaaaatatcgccagcatctgcgccagattagtgagcgcggtagggttttcgaacggatgcgaagagttggcgttaaagaaaccgccgccgttggtgccaagcattttgatcgcctcctgcgaagcaaccggacccatcggcaaaagttgtttagcgccttcaagggtggtgatgggctgataagccgacagattttgcggtacgccttgttggataaaaaacagcgcgataattaacgcgacaggaaataatatccatagcgtaatgcgtaccagatcctgccaggcattacccagcgtgtgcacattctggcgcgtaaaggcgcggataagcgcaaaaaccaccgcaatcccggtcgccgccgacaggaaattttgcaccgtcagcccggccatctggctaaagtagctcagcgtgctttcgccgctgtaggcttgccagttggtattggtgacaaagctgacggcggtattcagcgccagatcccaggacagccccggtagccgctgcggatttaagggcagccactcctgccagaacagcaggcaaaacaggatgcccagtcccagcagattgagcgtcagtagcgccagtaaatactgacgccagttcatttcgtggtcggtaatgccaagagtccgccagaggatacgctcaacgccagccacgcccggcaacggaacggcggcgatgagccttgccaggcccgaacccaacggtttcgccagtaccaataaaatcagtaaaaaactggcgatcagtaaaaatccttgcgcggccatcagaacgcctccgcattaatcagggcatagaccagataacctaaaagtaagaaaaccagcacgatgccggttatcacgcctgcactcacagagcacctccagtggcattgttttactcctgagaaaggtaattttttggctgcaaagatttcgcaaaaattggcgggcagagtgtaaaaaaagtataaaaatggcaaagaccattatttaactaatgattagtattaatttaacctttttgtaactaatttacgctttgaatgtaaatctgctggaaaagcgtgaaaataagtggtcggatgagtagtaaaattacaccgaaagcggtactattttaatcaggtaacgaggttcaatttttcggtgctattcaccgattcaatctataccggggcggatagcgtcggtataaaggggggaaacgtatggaacactataaagactatccagcgcatgtcatttttgcacgtcgtgctttcgcggtgaccgcaggcgtgctggcgttgccggtgatgctcttctggaaagaccgcgcgcgtttttatagttatctgcaccgtgtctggtcgaaaaccagtgataaaccggtatggatggcgcaggctgaaaaagccacctgcgacttttattaatcgcgaccagcctgaaaaaaccgtcagccgccacgctggcggtttttttatgcgccagggtctacactgtttaacgctattcgccgtgacgttttatctttcaggagttgtatgcccacccatttagtctggttcaggcgcgatctgcgtttacaggataaccttgcgctggccgccgcctgccgcgatgcatccgcgcgggtgctggcgctttatatttccacccccgcgcagtggcaggcccatgatatggcgccgcggcaggcggcattcatcagcgcgcagctcaatgcgctacagacggcccttgcagagaaaggcattccgttgctgtttcatgaagtggcggattttaacgccagtattgaaacggtcaaaaacgtttgccgacagcatgacgtcagccatctgttttataactatcagtatgagtttaacgagcgtcagcgtgatgcggcggtggaaaaaacgctgccctctgtcatctgcgaaggctttgacgatagcgtgattctggcgcccggcgcggtgatgaccggcaatcatgaaatgtataaagtttttacgccgtttaaaaatgcctggttgaaacggctaaaagaagatatcccgccgtgcgttccggccccgaagatccgggtgagcggcgcgctttctacacccttaacgccagtctcgcttaactacccgcaacaggcgtttgacgccgcgcttttcccggtggaagaaaacgcggtcatcgcgcagctacgtcagttttgcgcgcagggcgcagacgagtacgcgttacggcgcgatttccctgcggttgacggcaccagtcggctttccgccagcctggcgacgggcggcctgtcgccgcgacagtgcctgcaccgattactggcggagcagccgcaggcgctggacggcgggccgggaagcgtctggttgaatgagctcatctggcgggaattttaccgtcatttaatgacctggtatccggcattatgcaaacaccagccgtttatccgctggacaaaacgcgtcgcgtggcaggaaaacccgcactattttcaggcatggcagaaaggcgaaaccggttatcccattgtcgatgcggcgatgcgccagcttaacgcgacgggctggatgcataaccgtttacgcatgattaccgccagctttctggtaaaagatctgttgattgactggcggttgggggagcgctatttcatgtcgcagcttattgacggcgatcttgccgccaataatggcggctggcagtgggccgcttcaaccggtaccgatgccgcgccttattttcgtatttttaatcccacgactcagggagagaggttcgatcgcgacggcgaatttatccgccagtggctaccggcattacgcgatatccctggaaaagcgattcacgagccgtggcggtgggcggaaaaagcgggagtcgtgcttgattatcctcggcctattgtggagcacaaacaggcgagaatcgcaacgctttccgcctatgaggcggcgagaaaaggggcgtgatacaggcccggtagcgcaaactaccgggcattctgctatcaggattcgacggccagcgcgcggcttttgaatttgaaggactgatacagccaaatcagcaggacaacccctacgcaggctaacgcgccccaggtgatctgttcaaaaacatccacataggcgttgatggcgtaattaaccgcgccgctggcgtcgaaggcgctttgcgaggtctggtcagcgatgacgcctgccagatagttagctatcgcgccggacagcagcatataaattccggttaatacgccggtgacgccggggatatcaatgcgcgtaatttgcgacatggcgaccgggtcgataaatagctcggcaaagcccatcaccgccagtcccagcaccattagcggcattgaagagtgtccgtaagcggcggaccagcgtgcgctcagggtcagaatacagaatccggcgctcatcagaccgagacccagcgcgaatttgccccagatacgcacggtgcgattaccgcttacgctctctttaaccagccaggccaggacgaccccacacagcatcacggcaaaggcgttcaccgactggaacatggcggtaggaacggaatagcccagaatatcgcggttcacaaagcggtcgatatacaggctgatagaactgccgccctgctgggcaaacgcccagaacagcatactgaacagggtcagggtgacaatcagccccagttctttgcgctgtttggccgtttgcgcctggtgataaatttttgccagcacgaccaggccgatcgcggtcgccacgattaaggcatagacagaccattctttccagaacagaacggtaatcagcaacggcgccgctaccagcaaaattaacagccagccccagttcggcagcaggtagtttctggcgcacaacacggctttattcacgccggtggtgtgggtgaaatgacgatttccacacaggaagatcactaaccccgcaagcataccaatggcggcgagcgcaaagcccatcgcccaactgtactcctcttgcacatagccgcaggcgataggcgccacgatcgaaccaatattgcccgctgcgtaaagcagcgagaacccgccgtcgcggcgcggatcttccggctggtacagttcgcccagcaggcagctaatattcgatttaaacaggccgtagccgcagacaatgatcgccagcgacagataaaggaatgtcggcgcgatctcactggcgcccagcactaaatgacctatagccattaaaaatgcgcccagcatgactgccattcggttgccaagcaccttatccgccagatagccgccaagaatcggcgttacgtagaccagcgaacaataagcgctgaataactcataggcgtggttatcgtcgtattttagctgattggtgagataaagaatcagtagggcgcgcataccataaaagctgaagtactcccaaatttgcagggcgacaacgtagtaaatagcgcggggttgagatgcttgtttattcatcgtatttccgggatagagacgctgcggcaagaaagcgggcatctcagataatgcctttcttagtgggcttattaagcctgccgcatcgccgtgtttccttaaagttaccaacatgatacagaactgattttttctgcaatatgcgttctgattgcataaatatacatgaaaccgatcgtgttttgctaagtaatttgcgccaaacccgggggtgattgtttcttgatgtgtcaaacaaatgtttatcgacgaacggctaacaggaggctatgttaacggaggctgaacccgtaacgggaaagtagaacgtgggttaaagggagcgatgatgaaaaacaccgagctggaacaactgattaacgacaagctgaacagtgcggcaataagcgattatgcgccgaatggtttacaggtcgaaggaaaagagacggtacagaaaatcgttaccggcgtgaccgcaagtcaggcgctgctcgatgaggcggtgcgtttgcaggccgatgcggtcattgttcatcatggttacttctggaaaggcgagtctccggttattcgcggtatgaaacgccgtcgcttaaaaacgttactggcaaatgatattaacctttacggttggcatctgccgctggatgcgcaccctgagctgggcaacaatgcgcagttggcggcgctattaggcattaccgtgaaaggagaaattgagccgctggtgccgtggggagagctctcaatgccggtgccggggctggaactggcctcatggattgaagcgcgtctggggcgtaaaccgctatggtgcggcgataccgggccagagaatgtgcagcgtgtcgcctggtgtaccggcggcgggcaaagttttattgatagcgccgcccgcttcggcgtggatgcttttattaccggcgaggtgtctgaacagaccattcattccgcgcgcgaacaggggctgcatttttatgccgccgggcaccatgccactgaacgcggcggtattcgcgccctgagcgaatggttgaacgaaaacacggcgttggatgtgacgtttattgatatccctaacccggcataactgagaggtaataaagtgcagcgagcgcgttgttatctgttaggcgaaacggcggtcgttctggaacttgaaccgccgattacgctggcgagccagaaacgcatctggcgtctgacgcagcgtctggtcgatatgccgaacgtggtggaagccattcccgggatgaacaatatcaccgtgatcttgcgggaaccgcaaaccctggcgctggatgcgattgagcgtctgcagcgctggtgggaagagagcgaggcgctggagccggactcgcgttcggttgagatcccggtgatctatggcggcgcaggcgggccggatctggcggcggtggcacggcacagcggtttgagtgaaaagcaggtcgtggagctacatgcctccgttgagtatgtcgtctggtttttaggctttcagcctggctttccctatcttgggaatttaccagaaccgctccatatgcccagacgcgcggagccgcgcctgcaggttccggccggttctgtcggcatcggcggcgcgcagacggggatttatccattatccacgccgggcggctggcagctgatcggcctcacgccgttgaagttattcgatccgatgcgggagcccccggttctgctacgccctggcgatagcgtacgctttgtgccgcaaaaggagggaatatgctgaatattattcgcgcggggatttacacctccgtgcaggatagcgggcgtcacggctttcgtcagtcggggctgagtcactgcggtgcgctggataaacccgcctttcagaccgctaatctcctggtcgggaacgatgcgaatgccccggcgctggaaatcactctcggtcaactggttgtcgaatttgaaaatgagacctggttcgctcttaccggcgcaggctgcgaggcgcagttggatgatcaaccggtctggacaggctggcgattgccggtaaaagcgggtcaacgtcttacgctgcatcgaccgcttcacgggatgcgtagctatctggcggtggcgggcggtattgctgtgccggaggtaatgggatcgtgtagtaccgatctgaagtccggtatcggtgggctggaaggacggttgctaaaagatggcgatcggttggcgatgggtaaaccatcgcgacagtttagcgggccgcagggcgtgaagcagttactgtgggggaatcgcatccgtgcgctgccggggccggaataccgtgaattcgatcgcgcctcgcaagaagcgttctggcgttcgccgtggcaactcagtccgcaaagtaatcgcatgggctatcgtttgcagggtcaatcgttaacgcggacaacggatcgcgaactgctgtcgcacggtttgctgcccggtgtcgtgcaggtgccttacaacggccaacctattgtgctaatgaatgatgcccagacaactggcggctatccgcgcattgcctgcatcatcgaggcagatatgtaccatctggcgcagatcccgctagggcaaccgatccattttgtgcaatgttcgctggaagaggcgctcaacgcgcgccgcgagcgtcagcgctatctggaacagcttacctggcggcttcagcatgaacattgatttaaatgcggatgtgggcgaaggctgcgccagcgacagcgaattattaacgctggtctcctccgccaatatcgcctgtggttttcacgccggtgatgcgcaaaccatgctgaccagcgtgcgcgaggcgctgaaaaacggcgtggcgatcggcgcgcatcccagctttccggatcgggataattttgggcggacggcgatggctttgccgccggaaacggtatacgcccagacgctgtaccaaatcggcgcgctgggggcgattgttcaggcgcaaggcagcgtgatgcgccatgtcaaaccgcacggtatgctctataaccaggcggcgaaagatccccatctggcacaggcgattgcgaaagcggtacacgactatgatccgtcactgatactggttggactggcgggaagtgagctgatccgggccggtgagcgccatcgcctggtgacgcggcaggaggtgtttgccgatcgcggctatcaggccgacggtagcctggtgccgcgcatgcaacctggcgcgctgattcacgacgaagagcaggcgctggcgcaaacgctggatatggtacaagccgggagagtgaaaagcgttactggcgtgtggacgactgtcacggcgcaaacggtgtgcattcatggcgacggcgagtatgcgcttgcattcgctcgcaggttacgcgccgcgttcaatgcgcgtaatatacacgttattgcctgagagcccgacgattgaagctattatattacggctgtggatattcattatggcgttcgatgtgcattcccgatagtcagaggcggtgtagtccattaatcaactgttaacaaaggatattattatgcctgaaggcccggaaattcgtcgtgcggcggataatctggaggcggcaatcaaaggcaaacccttaaccgatgtctggtttgcctttgcacagttaaaaccgtatgaatcgcagcttaccggtcaacttgttacccggatagagacgcggggaaaagcgttattgacccacttttcaaatggcctgacgctctacagccacaaccaactctatggcgtatggcgggtgatcgatactggtgaaataccgcagaccacgcgtatattgcgcgtcaggctacaaacggcggataaaactattctgctttatagcgcgtctgatatcgaaatgctgacagcagagcagctcacgacgcacccttttttacagcgggtcggtccggatgtgctggacgcgcgtctcactccggaagaggttaaagctcgattgctgtcgccgcgttttcgcaaccgacaattttctgggctgttgctggatcaggcctttctggcgggattggggaattatctgcgcgttgaaatcctctggcaggtagggttaaccggacagcataaagcgaaagatctcaacgaggcgcaactgaatgcgctttctcacgcgctgttggatattccgcgcctgtcctacacgactcgcggtcagtcggatgaaaacaagcatcatggcgcactgtttcgctttaaggttttccatcgtgacggcgaagcgtgcgagcggtgcggcggcattattgaaaagacaacactgtcctcacgcccgttttactggtgcccgcattgccagaaatagccggaaccgccatcggcgagcggctattgcctgatggcgcgacgcttatcagccctacaaaggttgtctgggcgcataggttgatataaaacgggccactgctggcccagttaacagaatgctgaacagccgtagggtttgcattgccatgatgagcgccatatcggcactgcttcctgccgcgatcgcggcaaccgtatccagaccaccgggactggtggcgagataagccgtcataaaatcaatctgcatgtagtaagccattccccacgccatcgcggcgcaaatcgccatcagcgcgaaaattgacaataagatttgcggcaatggccgcagcgccataaaaaacacctgtctgtcaaaacccagcccaatacgccagcctatcgccatatacgccacggccagcagccattcgggtaattcaatttcaatgatgccttgcgaatggagaatcgcgcctgccaacatggggagcagcatcgtgccggaagggatacgcaacaggcgaccggcaatgcccgccacgatcgctaatagcagcgtcgtcaataaattaccgctaagcggtggaaaccagatcacctgttggctgaccgctgccgcgctgtcgccgagtatcaggcgtgtcaccagcaccgccgcgccagccacaaacagtacccgtagatactgcataaacgccaccaggcggatatccgccccgtaatcttgcgccatcgctaccattgccgccgcgccgcccggcgaagacccccatgcgccggtgttgccgggcagcgagctgtagcgtaccagcagccagccgactatcgcgctggaaagcagcgtcaccagcaacactaaaagcacgaccggccagtagagggcgagggtggtcaatatcgaaccggttagattttgggcgatcatacagccgagaatcgcctgcgcggcgagaaaaataccgcgcggaagttgtagcgtactacctcgcaaactcaacacgatacccgcaatcattggaccgagcagcatcgccgccggaaggtgcagccagagaaaaataagggaaatgagcagcgataacaggaacaacaaaaaccactgcagaatcggcattccatgctccctgaatgatatttagcgaaaccttaattaatcatagagagtaacggggtaagaataaaataatgaggataagaaaaaagggaaaatgtaccggatggcgagggttgcgtcgccatccggttgtcaattaacgcttcagcgccgatttaaaatcgcgtttatcgtagccggtatacagctgacgaggacgggcgattttcatgccgtcagtgtgcatttcattccagtgtgcaatccagccaacggtacgcgccatggcgaagatcacggtgaacatggaggacggaatgcccatcgctttcagaatgatgccggagtagaagtctacgttcgggtacagtttcttctcgatgaagtacgggtcgttgagcgcaatgtgctcaagctccatcgccacttccagcagatcatctttggtgcccagctctttcagcacttcatggcaggtttcacgcatcacggtggcgcgcggatcgtagtttttgtaaacacggtgaccgaagcccatcaggcggaaagaatcattcttgtctttcgcacggcgaacaaattccggaatgtgtttaacagagctgatttcttccagcattttcagcgcggcttcgttggcgccgccgtgcgcgggtccccacagggaggcgatcccggcggcaatgcaggcgaatgggttggcgccgcttgaacctgcggtacgtaccgttgacgttgaggcgttctgctcatggtcagcgtgcaggatcagaatacggtccatcgcgcgctccagtaccggattcacttcataggtttcacacggcgtggagaacatcatgttcaggaagttaccggcgtaggaaaggtcgttgcgcggataaacaaacggctgaccgatggaatatttgtaacacatcgccgccatggtcggcattttggacagcaggcggaacgccgcgatttcacggtggcgcggattgttcacatccagcgagtcgtggtagaacgccgccagcgcgccagtgatcccgcacattaccgccatcggatgtgagtcgcgacggaaagcatggaacaggcgagtgatttgctcatggatcatcgtatggcgggtgactgtcgttctgaactcgtcatactcttcctgcgtcggtttttcgccgtacagcaggatgtaacagacttccagatagttggaatcggtagcaagctggtcaatcgggaaaccgcgatgcaacaaaatgccttcgtcgccgtcgatgaaggtgattttagattcgcaggatgcggtagaggtgaaaccagggtcaaaagtaaaaactccttttgaaccgagactacgaatatcaataacatcttgaccgagtgtaccttttagcacatccagttcaatagcagtgtcaccagtaagggtgatttttgcctttgtatcagccatttacggtctccttagcgccttattgcttaagactgccggaactcagacttgccttctccacgtcatcttcctcgtcgttagtgcagggaagattctgtgtatgcatcaatcaaccgttaccagtttgttatttggctcgccgctctgtgaaagaggggatgacctgggtacagagcaatgggcgcttgcaggtaacggcttgattaatttcgaattagcagcaaatcaggaacgtagcaatccgagtaatgtaacctgtctatcactaataactgtcctgaaagaatgggtcaatatcattgtactgttacataacttattaacaggtgaaagagtgaccccataacttttacgcattatatgctttttctggtgtcgtttgtaacaattttgtttaatgtttgtcaaatcagatgattgaaaattaaaaaaatgttgttatcgtgacctgtgtcactgttcaggataaaacccgacaaactatatgtaggttaattgtaatgattttgtgaacgtcctatactgccgccaggtctccggaataccctgcaatcccgagccacccagcgttgtaacgtgtcgttttagctactggaagcagtgttttacatgacgcgcagttatagaaaggacgctgtctgacccgcacgcagaccggaggaaggaaatcccgtcgtctttctggctacaggtagattcacctctgtaaccgaagtcttaagggaataataagaacagcatgtgggcgttattcatgataagaaatgtgaaaaaacaaagacctgtcaatctggatctacaaacgattcggttccccatcacagcgatagcgtccattctccatcgcgtatccggtgtgattactttcatcgccgtcggcatactactgtggctactgggcaccagcctctcttctccggaaggattccagcaggccgccgatatcatggacggcttcatcgttaaatttatcatgtggggcatccttaccgcgctggcgtatcacgtcatcgtgggaattcgtcacatgttaatggattttggctatctggaagaaacattcgaagcgggtcaacgctctgccaaaatctcttttgttatcactgtcgtgctttcacttctcgcaggagtcctcgtatggtaagcaacgcctccgcattaggacgcaatggcgtacatgacttcatcctggtccgtgctaccgctatcgttctgacgttatacatcatctacatggtgggttttttcgccacgagcggcgaactgacctttgaagcctggaccggtttcttctcatcggccttcaccaaagtcttcaccctgctggcgcttttttccatcttgattcatgcctggatcggcatgtggcaggtgttaaccgactacgttaaaccactggcagtgcgtctgatactgcaactcgttattgttgttgcgctggtggtttacgtcatctatggatttgttgtggtgtggggtgtgtaatgaaactgccagtcagagaatttgatgctgttgtgattggtgccggtggcgcaggtatgcgcgcggcgctgcaaatttcccagagcggccaaacctgtgcgctgctctcgaaagtcttcccgacccgttcccataccgtttccgcgcagggcggtatcaccgtggcgctcggcaatacccatgaagataactgggaatggcacatgtacgataccgtaaaagggtcggactacattggtgaccaggatgctatcgaatatatgtgtaagaccggaccggaagcgattctggaactggagcacatggggctaccgttctcccgtcttgatgatggacgtatctatcagcgcccgttcggcggccagtcgaaaaactttggcggcgagcaggcggcacgtaccgcggcggcggctgaccgtaccggtcacgccttgctgcacacgttgtatcaacagaatttgaaaaaccacaccacgattttctccgaatggtatgcgctggatctggtgaaaaaccaggatggcgcggtggtggggtgtaccgcactgtgcatcgaaaccggtgaagtggtgtacttcaaagcccgcgcgacggtgctggcgaccggcggcgcaggccgtatctaccagtccaccaccaacgctcacatcaacaccggtgacggtgtcggtatggcgctgcgtgccggtgtcccggtgcaggacatggaaatgtggcagttccacccgaccggcatcgccggggcgggcgtgctggtgacagaaggctgccgcggcgaaggcggttacctgctgaacaaacacggcgagcgctttatggagcgttatgcgccgaatgccaaagacctggcgggtcgtgacgtggtggcgcgttccatcatgatcgaaatccgtgaaggccgcggctgtgatggtccgtgggggccgcacgctaaactgaaactggatcacctgggtaaagaggtgctggaatctcgcctgccgggtatcctggagctgtcccgtactttcgcccacgttgacccggtgaaagagccgattccggttatcccgacctgccactacatgatgggcggtattccgactaaagtgaccggtcaggcgctgaccgtgaacgagcagggcgaagacgtggtcattccggggctgtttgcggtaggcgaaatcgcctgtgtatcggttcacggcgccaaccgtctgggcggtaactcactgctggatctggtggtctttggccgcgcggcggggctgcatttacaggaatccatcgccgagcagggcgtgctgcgcgacgccagcgagtctgacgttgaaggttctctggagcgcctgaatcgctggaacaataaccgcaatggcgaagatccggtggctatccgcaaagcgttgcaggagtgtatgcagcataacttctccgtattccgtgaaggcgacgcgatggcgaaagggcttgagcagttgaaagtgatccgcgagcgtctgaaaaacgcccgtctggatgacacgtccagcgagtttaatacccagcgtgttgagtgtctggagctggataacctgatggaaaccgcctacgccactgccgtatcagccaacttccgaacggaaagccgcggcgcgcatagccgcttcgatttcccggagcgtgatgatgccaactggttgtgtcataccctgtatcagccgcaaacggaatccatgacgcgccgaagcgtcaatatggagccgaaactgcgtccggcgttcccgccgaagattcgtacttattaattgcggagacaggatgatgaaactcgaattttcgatttatcgttataacccggatgtcgataacgctccgcgtatgcaggattacaccctggaaggcgaagaagggcgcgacatgatgctgctggatgcgttaatccagcttaaagaaaaagatcccagcctttctttccgtcgttcctgccgcgaaggtgtgtgcggttctgatggtttgaatatgaacggtaagaatggtctggcctgtattacccctatttcggcgctgactcagccgggtaagaagattgtgattcgcccgctgcccggtttgccggtgatccgcgatttggtggtagacatggggcaattctacgcacaatatgagaagattaagccttacttattgaataatgggcaaaatccaccggctcgtgagcatctgcagatgccggagcagcgtgaaaaactcgatgggctgtatgaatgtattctttgcgcctgttgctcaacatcctgcccgtcattctggtggaacccggataagtttatcggtccggcggggctgctcgcggcgtatcgattcctgatcgatagtcgtgataccgagaccgacagtcgtctggaagggatgagcgatgcattcagcgtattccgctgtcacagcattatgaactgcgtcagtgtatgtcctaagggactaaacccgacgcgcgctatcggccatattaagtcgatgctgttgcagcgtagcgcataagtagttgtagtggttgccggatggcgatgtaccgtcttatccggcctacaggcgcaagcccgtaggcctgataagcgcagcgccatcaggcaatagaagtgcaggaaacctctaaaaactgccatatgattagtaataatcgagatgttcagagcgagacaaggcgcggtctgaacgaatcttcgggagcatagttaactatgtgaccggagtgagcgaaggccgcaacgcagtcgtagcctgaacagcgaagattattagacagtttttaaaggttccttagcggacgcagatgacacgacagtccgcaacaagtgaaccccggcacgcatacagcgtatgcgtggttagtatccacggcgaaatactcgtcatagttcacgttgcatgtgcgttggctgcacttgctcaccccggtcacttactggatgtaagctcccagggattcgcaagcttgccgccttcctgaaacgtgacctatttagagtattaaataagcagaaaagatgcttaagggatcacgatgcagaacagcgctttgaaagcctggttggactcttcttacctctctggttcgaatcagagctggatagaacagctctatgaagacttcttaaccgatcctgactcggtagacgctaactggcgtttgacgttccagcagttacctggtaccggagtcaaaccggatcaactccattcaaaaacacgtgaatatttccggcggcaggcgttggctggctcacgtcactcttctacgatttccgaccctgacaccaatgtgaagcaggttaaagtcctgcagcttattaacgcttatcgtttccgtggccatcagcatgcaaacctcgatccgctgggtctgtggaaacaagaacgcgtggcggatctggacccttctttccatgatttgaccgaggccgatttccaggaaaccttcaatgtcggctcctttgccagcggcaaagagacgatgaagctgggcgagctgctcgacgcgctcaaacagacctactgcggcccgattggcgctgagtatatgcacatcaccagcaccgaagagaaacgctggatccaacagcgcatcgaatccggtcgtgcggcctttagcgctgacgagaaaaaacgcttcctgaacgaactgaccgccgctgaagggctggaacgttatctgggtgccaaattcccgggtgcgaaacgtttctcgctcgaggggggagatgcgctgatacccatgctgaaagagatggttcgccatgcgggtaacagcggcactcgcgaagtggtgctggggatggcgcaccgcggtcgcctgaacgtgctgatcaacgtactgggtaaaaaaccgcaggatctgttcgacgaatttgccggtaagcataaagaacatctgggtaccggcgacgtgaagtatcacatgggcttctcgtcagatatcgaaaccgaaggcggtctggttcacctggcgctggcgtttaacccatcgcatctggaaattgtgagcccggtggtgatgggctccgtgcgcgcccgtctggacagactggacgaaccgagcagcaacaaagtgttgccgatcactattcacggcgacgccgcggtgaccggccagggcgtggttcaggaaaccctgaacatgtcgaaagcgcgcggttacgaagtgggcggtacggtacgtatcgttatcaacaaccaggtgggcttcaccacctctaacccactggatgcgcgttcaacgccttactgcaccgatatcggtaaaatggtccaggcgccgattttccacgtcaatgcggacgatccggaagccgtcgcttttgtgacccgtctggcgctggacttccgtaacacctttaaacgcgatgtgttcatcgatctggtgtgctaccgccgtcacggccacaacgaagccgacgagccaagcgcaacccagccgctgatgtaccagaaaatcaaaaagcatccgacgccgcgtaaaatctacgccgacaagctggaagcggacaaagtcgcgacgctggaagatgccaccgaaatggttaacctctatcgcgatgcgctggatgcaggcgaatgcgtggtgaaagagtggcgtccgatgaatatgcactcgttcacctggtcgccgtatctaaaccacgaatgggatgaagcatacccgaacaaggtagaaatgaagcgtctgcaggagctggcaaaacgtatcagcaccgtgccggaagccattgaaatgcagtctcgcgtggcgaaaatttatggcgaccgtcaggcaatggcggcaggcgagaaattgtttgactggggcggtgcggaaaatctggcttacgccacgctggtcgatgaaggcattccggtgcgcctgtccggggaagactccggtcgcggcaccttcttccatcgtcatgcggtgatccacaaccagacgaacggctcaacgtatacgccgttgcagcatattcacagcggtcagggacagtttaaagtctgggactccgtgctgtctgaagaagcggtactggcttttgaatacggttatgccacggcggaaccacgtaccctgactatctgggaagcgcagtttggcgattttgccaacggcgcgcaggtagtgattgaccagttcatctcctccggcgagcagaaatggggccggatgtgcggtctggtgatgctgttgccgcatggctatgaagggcagggcccggagcactcttccgcgcgtctggaacgttatctgcaactttgcgccgagcagaatatgcaggtttgcgtgccgtccaccccggcgcaggtctaccatatgctgcgccgtcaggcgctgcgcgggatgcgtcgtccgctggtggtgatgtcgccgaaatcgctgctgcgtcacccgctggcggtttccacgcttgatgaactggcgaacggttccttccagccggccattggcgaaattgacgagctggaccctaaagccgtaaaacgcgtggtaatgtgttctggtaaggtttattacgacctgctggaacaacgtcgcaaaaacgaccagaaagatgtcgctatcgtgcgcatcgaacagctctatccgttcccgcataaagcggtgcaggaagcgctgcaaccatacgctcacgtccatgattttgtctggtgccaggaagagccgctcaaccagggcgcatggtactgcagtcagcatcatttccgtgaagtgattccgtttggggccgctctgcgttatgcaggtcgcccggcctccgcctctccggcggtagggtatatgtccgttcaccagaaacagcaacaagatctggttaatgacgcgctgaacgtcgattaaataaaggataaataatgagtagcgtagatattcttgttcccgacctgcctgagtccgtagcggacgcgaccgtcgccacctggcataaaaaaccgggtgatgcggttgttcgtgacgaagtgctggtagaaatcgaaactgacaaagtggtactggaagtaccggcatcagcggacggcattctggatgcggttctggaagaggaggggacgactgtcacctctcgccagatcctgggtcgcctgcgtgaaggcaacagcgcgggtaaagagaccagcgccaaatctgaagagaaagcgtctacgccggcacagcgccagcaggcgtcgctggaagaacaaaacaacgatgcgctcagcccggcgatccgtcgcctgctggctgaacacaatctggaagccagcgccattaaaggcactggtgtgggtgggcgtctgacccgtgaagatgtggaaaaacatctggcgaaaggcgagtctaaagcacccgctgttgaacctgcagcacaacccgctctgggcgcgcgcggcgaaaaacgcgtgccaatgacccgcctgcgcaagcgcgtggccgagcgtctgctggatgcgaaaaattctaccgccatgctgacgaccttcaatgaagtcaacatgaagccgattatggatttgcgtaagcagtatggcgaagtgtttgaaaaacgtcatggtatccgcctgggctttatgtccttctacgtgaaagcggtagtggaagcgctgaagcgttatccggaagtgaacgcctctatcgacggcgatgacgtggtgtaccacaactactttgatgtgagcatggcggtgtctacgccgcgcggcctggtcacgccggtcctgcgtgacgtggatacgctgggcatggctgacattgagaaaaaaattaaagaactggctgtcaaaggccgcgacggcaagctgaccgtagaagacctgaccggcggtaactttaccattaccaacggcggcgtattcggttcgctgatgtctaccccgatcatcaacccgccgcagagcgcgattctgggaatgcatgctattaaagacaggccgatggcggtggatggcaaggtggaaatcctgccgatgatgtacctggcgctctcttacgatcatcgcctgatcgatggtcgcgaatccgtgggcttcctggtcaccatcaaagagttgctggaagatccgacccgtctgctgttggacgtgtagtcagcaagagcatcacctgctacctgtaggccggataaggcgttcacgccgccatccggcgatggtgtaatgcctgatggcgcgcagctttcaggcctacaggtctaaagataacgattacctgaaggatggacagaacacatgaacttacatgaatatcaggcaaaacaactttttgcccgctatggcttaccggcgccggtgggttatgcctgtactactccgcgtgaagccgaagaagccgcgtctaaaatcggtgccggcccgtgggtagtgaaatgtcaggttcacgctggcggccgcggcaaagcgggcggtgtgaaggtagtaaaaagcaaagaagagattcgcgcctttgcggaaaactggctgggcaaacgtctggtgacctatcaaacagacgctaatggccaaccggtaaaccagattctggttgaagcggcgaccgacatcggcaaagaactgtacctcggcgcggtggttgaccgtagttctcgtcgcgtggtctttatggcatctaccgaaggcggcgtagagatcgaaaaagtcgcggaggaaaccccgcatctgatccataaagtcgcgctcgatccgctgaccggcccgatgccgtatcagggacgggaactggcgttcaaattgggtctggaaggtaaactggtgcagcagttcaccaaaatctttatgggcctggcaaccattttccttgagcgcgacctggcgctaatcgaaattaatccgctggtgatcactaagcagggcgatctgatttgcctcgacggcaagctgggcgctgacggcaacgcgctgttccgccagccggatctgcgtgaaatgcgtgaccagtctcaggaagacccgcgtgaagcgcaggcggcgcagtgggaactgaactacgtcgcgctggacggcaacatcggttgcatggtgaacggcgcgggcctggcgatgggcaccatggacatcgttaagctgcatggcggcgaaccggctaacttccttgacgtgggcggcggcgcaaccaaagagcgcgtcaccgaagcgtttaaaatcatcctctcggatgacaacgtgaaagcggttctggttaacatcttcggcggtatcgtccgttgtgacctgattgccgacggtatcatcggcgcggtggaagaagtgggcgtgaacgttccggtggtggtgcgtctggaaggcaacaacgccgaactcggcgcgaagaaactggctgacagtggcctgaatattattgcagcgaaaagtctgacggatgcagctcagcaggttgttgccgcagtggaggggaaataatgtccgttttaattaataaagataccaaggttatctgccagggcttcaccggtagccaggggactttccactccgaacaggcgattgcttacggtacgcaaatggtcggcggcgtaacgccgggcaaaggcggcaccacgcatctgggtctgccggtgttcaacaccgtgcgcgaagcggtagaagccaccggtgcgaccgcatccgttatctacgtgccggcgccgttctgcaaagactccattctggaagcgatcgacgcaggcatcaaactgattatcaccatcaccgaaggtattccgacgctggatatgctgaccgtgaaagtgaagctggacgaagcgggcgtacgcatgatcggcccgaactgcccaggtgtgatcaccccgggcgaatgcaaaatcggcatcatgccgggtcacattcataagccgggtaaagtgggtatcgtttcccgttccggcacgctgacctatgaagcggttaagcagaccaccgactacggtttcggccagtccacctgcgtgggtatcggcggcgacccgattccgggctctaacttcatcgacatcctgaaactgttccaggaagatccgcagactgaagcgatcgtgatgatcggcgagatcggcggtagcgcagaagaagaagcggctgcttatattaaagaacacgtgaccaagccggttgttggctatatcgcgggtgttaccgcgccgaaaggcaaacgtatgggccacgctggcgccatcattgccggtggtaaaggcactgcggatgaaaaattcgccgcgctggaagccgcaggcgtgaaaaccgttcgcagcctggccgatatcggcgaagcgctgaaagcaattataaaataaaactcgctgttcttgcgggaacagataaatgtccgttttcgacatggttggccacctttacggtggccttttttatggctttattgtttgtggcaaagtacgggtgaagcatccgggatataaaattattggctttgtaaatattgagctataggaaaatgatgcctcattaaaaaaacatggtggagtctaaaaataattgataataaccgtctggcagcggcagtaaatttactcagtttgccggttaactcttttgcagcaaatacagatgctgtcttagtgaaagacctgccgacctcatcggagacggattatgcgctttccgccatgaaaaaagcgcatcgcagcattacactatgttgacgctaacctctatagtaaattgacgcttgactctgtggccgcgcatgtttgcctgagcgcgaactacatgtctcctcagatgtatcgcgcttacacagactgcttgtttaatggcagaataaaacagctattttaatcataagagtaccgacattatttccatgaagtattaaaggtatcgtttaataaatcatatgaacttttgctggttaaaagaggttaactttaaaaattattaagaacttattggcactattcgttcgtgattaattatgtctaaagggtatttatggctgcgaataaacagaattatcactatgagtgacgtagaaattgagggtaaatctgtgaaggtgataacagaatcttcgctataataattatggagaggtaaatacggtgttgttgaaataaagaaaaattagcgaataaaatgtttgatcctggctatctggaaggcttattagcgataattaaggcgataacctggcaagatgatcctggccgttagtcgtcgggaaagggaagttggggcagggtaatcccggtgggatgatggcgcgtgtgcaatgagatagtttctttgcggtgttaattataagtaaaataaaaatagactaaatgtataaaataataagtgttgataacctgcagaaaaaatctgtgagctatttagcaataattgaacatcaatgtggaatgttttttactggatgcggggcagtaaaaaacgcacaaaatgtttagccttatcgaataagcctctttttacagggggttggaaattactctttgcaaaaacaaaaagttaacaaaaaattcaccatgcattcaatgaataaacattattaacattaacttcaaaaattgattttaatcaatatttaaatgttggaaaagagcatcaaaactggttaaattgtccgtgatcaaattccctgaaaagcgatagattagccataaattgatcgctgtcgaaaaaagcaaatctgacccactaaaaacctgtttattgtaagggttttacggcgtaatatatttgcgggatcaatttgggttttttattaacatgtttgtaacctttcatcattactgtttccttcccgaggggatagtacgatgagaggccgcaaataaatttgtattggggcatgcgtgtgaccctttctaacggggttcactctcggagtcttcatgcgatgagcaaggagtcatgatgttagatatagtcgaactgtcgcgcttacagtttgccttgaccgcgatgtaccacttcctgtttgtgccgctaacgctcggtatggcgttcctgctggccattatggaaacggtatacgtcctttccggcaaacagatttataaagatatgaccaagttctggggcaagttgtttggtatcaactttgctctgggtgtggctaccggtttgaccatggagttccagttcgggacaaactggtcgtactactcccactatgttggggacatcttcggtgcgccgctggccatcgaaggtttgatggccttcttcctcgaatccacctttgtaggtctgttcttcttcggctgggatcgtctgagtaaagttcagcatatgtgcgtcacctggctggtggctctggggtccaacctctccgcgttgtggattctggtagcgaacggctggatgcaaaacccaatcgctgcggatttcaatttcgaaaccatgcgtatggaaatggtgagcttctctgaactggtgctgaacccggtagcacaggtgaaatttgttcatactgtggcgtccggctatgtcaccggcgcgatgttcatcctcggtatcagcgcttactacatgctgaaaggtcgtgacttcgcctttgctaaacgctcctttgctattgccgccagcttcggtatggctgccgtactgtccgttatcgtactcggcgacgaatccggttacgaaatgggcgacgtgcagaaaaccaagctcgctgcgattgaagctgaatgggaaacgcaacctgctccggcctcctttaccttgttcggtattcctgaccaggacaaacaggaaaaccatctggcgattcagatcccttatgcgctcggtattatcgctacgcgttccgtggacacgccggttattggcctgaaagatctcatggttcagcatgaagagcgtatccgtaacgggatgaaagcctatgaactgctggagcagctgcgcgccggttctaccgaccaggccgttcgcgaccagttcaacagcatgaagaaagatctcggttacggcctgctgctgaaacgctatacgcctaatgtgactgacgcgaccgaagcgcagatccagcaagcgacgaaagattccattcctcgcgttgcgccgctgtacttcgctttccgtatcatggtggcgtgcggcttcctgctgctggcgatcatcgcactttccttctggagcgtgattcgtaaccgcatcggtgagaaaaaatggctgttgcgcgcggcgctatacggtattccactgccgtggattgcggttgaagcaggttggttcgtcgccgagtatggtcgtcagccgtgggcgatcggcgaagtgttgccgacagccgtggcgaactcatcgctgaccgtaggcgatctgctgttctccatgctcctgatttgcggcctgtataccctgttcctggtggcagaattgttcctgatgttcaaatttgcacgccttggcccaagcagcctgaaaaccggtcgctatcactttgagcagtccaccgtgacttctcagccggcacgctaagacaggagtcgtcaaatgatcgattatgaagtactacgttttatctggtggctgctggttggcattttgctaattggtttcgctgtcaccgatgggttcgacatgggggtggggatgctcacccgtttcctcggtcgtaacgacaccgaacgtcgaattatgattaactctatcgccccgcactgggacggtaaccaggtgtggttgatcaccgcgggcggtgcgttgtttgctgcctggccgatggtttacgccgcggcgttctccggtttctatgtagcgatgatcctggtgctggcgtctttgttcttccgtccggtcggttttgattaccgttccaagattgaagacccgcgctggcgcaacatgtgggactggggcgtgttcatcggtagctttgtgccgccgctggtgattggcgtggcctttggcaacctgttgcagggcgtaccgttccacgtggatgagtatctgcgtctgtactacaccggtaacttcttccagttgctgaacccgtttggtctgctggcgggtatcgtaagcgtagggatgatcatcacgcagggggcgacttacctgcaaatgcgcaccgttggcgaactgcacctgcgcgcgcgcgccacctcgcagattgcggcgctggtgacattagtgtgctttgcgctggcgggcgtttgggtaatgtatggtattgatggttatgtcgtgacatccgcgattgaccatcatgccgcctctaacccgctgactaaagaagtggcgcgtgaagctggcgcctggctggtgaactttaataatgctccgatcctgtggttggttccggctctgggcgtggttctgccgctgctgactatcctgacttcccgtatggagaaaggcgcgtgggcattcctgttctcttcgctgaccctggcctgcattattctgacggcgggtatcgctatgttcccatttgtgatgccgtccagcacgatgatgaatgccagcctgaccatgtgggatgcgacatccagccagatgacgctgaacctgatgacctgggttgcggcggtgttcgtaccgatcattctgatctacaccagctggtgttactggaaaatgttcggtcgtatcactaaagaacatattgaaagcaacacccactctctgtactaagtaaggagcttaaaatgtggtatttcgcatggattctgggaacgcttcttgcctgtgcattcgggatcattaccgccctggcgcttgagcacgttgaagcgggtaaaaccggtcaagaagaaagctaatgacccatattatcgcaaaactgtatgcggtaatggacaagcgcccgttaagggcgctttccttcgtgatggcgatagtgctggcaggatgtatgttctgggacccgtcacggtttgccgccaggaccagcacgcttgaaatctggcacggattattgctgatgtgggcggtttgcgcaggcataatccacggcgtgggttttcgccctgaatccgtacactggcaagggattttttgtccgctccttgcggatatcgtccttatcgtcggcctgattttcttcttcttgtgaataagaaacctccttaaaaatataggggcttgcataagcccatatatttttactctcccttaacttccccccattcccaagcctcattcccacgcgtatagtagcaacgtttaaaagctctacttttgttgcattaccgggatataaagtgaatacaaggcgatatacaacggcattcttgaggcattacggcggcaagcggatgacgccaataaagaggctgcagggatgaataagtatatgtttcgatggccaattcgagtttattacgaagacacggacgccggcggtgtggtttatcacgccagctatgtcgctttttatgaaagagcgcgcacggagatgctgcgtcaccatcacttcagccaacaggtgctgctggcggagcgggtcgcctttgtggtgcgcaagatgacgctggaatactatgcgcctgcgcggctcgacgatatgcttgaagttcaaacagaaattacgtcaatgcgtggcaccgctttggttttcacgcaacgcattgtcaacgcagagaacacgctgctaaatgaagcagaggttctgattgtttgcgttgatccactcaaaatgaagcctcgtgcgcttcctaagtctattgtcgcggagtttaagcagtgactgacatgaatatccttgatttgttcctgaaggcaagccttctggttaaacttatcatgttgattttgattggtttttcaatagcatcctgggccatcattatccagcgaacgcgtattctgaacgccgctgcgcgtgaggcggaagcgtttgaagataaattctggtccggaatcgaactatcgcgtctgtaccaggaaagccaggggaggcgcgatagtctgtcgggctcggaacaaatcttttatagcgggttcaaagagtttgtccggctccatcgcgccaacagccatgcgccggaggcagtggtagagggggcgtcgcgtgcgatgcgcatctccatgaaccgagagctggaaacgctggaaacgcatatcccgtttcttggcacggtaggctcaatcagtccttatatcggtctgtttggcaccgtatgggggattatgcatgcgtttatcgccctgggcgcggtgaaacaggcgactctgcaaatggttgcgccgggtattgccgaagcattgattgccacggcgattggtctgtttgccgccatccctgcggttatggcttacaaccgactgaatcagcgcgtgaacaagctggaactgaattacgacaactttatggaagagttcaccgcgattctgcaccgccaggcgtttaccgtaagcgaaagcaacaaggggtaagccatggccagaacgcgtggacgaggtcgtcgcgaacttaagtccgaaatcaatattgtaccgctactcgacgtactgttggtgttgctgctgatctttatggcaaccgcgccgatcattacccagagcgtggaggtcgacttgccggaggcgaatcagtcgcaggcggtcagtagtaacgacgatccaccggtcattattgaggtttccggagtagggcaatacagcgtagtggttgataaagatcgaatggatcaactgccgtctgaacaggtgatcgcagaagtaaagcgtcatctgcaggctaatccgaaaacagtctttttaatcggcggcgcgaaagaggtgccgtacgatgaaataattaaagcgctgaacttgttacacagcgcgggcgtaaaatcggttggcttaatgacgcagccaatctgaagtctgcgtcccgttggcttgaaagacggcgagtaacaggcgaacagttttttgggaaccgagagtgtcaaaggcaaccgaacaaaacgacaagctcaaacgggcgataattatttcagccgtgctgcatatcatcttatttgcagtgctgatctggagttcgtttgatgagcatatagaggcttctgccggcggcggcggtggttccgctatcgacgcggtgatggtcgatcctggcgccgttgtgcagcagtacaaccgtcagcaggatcaacaggccagcgccagacgcgcggaagaagagcgtaaaaagctgcaacagcagcaagcagaggagctgcagcagaagcaggctgccgaacaggagcggttgaaacaacttgagaaagaacgtttagcggctcaggagcagcaaaagcaggctgaagaagcggcaaaactggcgcaacagcagcagcaacaggccgaagaagcggcgaaagcggcggcggacgcgaagaaaaaagcggaggccgaagcggcgaaagcggcggcggacgcgaagaagaaagcggaggccgaggcggcgaaagcggcggcggacgcgaagaagaaagcggaagccgaggcggtaaaagcggcagcggacgcgaagaagaaagcggaagccgaagcggcgaaagcggcggcggaggcgaagaagaaagcggaagccgaagcggcgaaagcggcggcggaggcgaagaagaaagcggatgccgaggcggcgaaagcggcggcggaggcgaagaagaaagcggatgccgcggcggcgaaagcagcggcggacgctaagaagaaagcggctgccgaaaaagcggccgccgcagaaggcgtcgacgatctgcttggcgatctcagctcgggtaagaatgcgccgaaaaccggcggcggcgcgaaagggaatggtcagccatcgaaagatagcggtacatcgggcgctaacggtggggcgacaggcgctgatatcagcgcctacgcgaaacagattcaggtcgccattcagagccgtctgtatgatgcgagcctgtatcagggcaaacaatgtgtcttgcatattagcctggcgccggatggctcattaaaaagcattacgtctgagggcggcgatccggcgctttgtcaggcggcgttaatggcggcaaaaaccgcgaaaattcctaaaccgccaagccaggctgtttatgagaaaataaaggatgccaaactagactttaaactgtagatacttttctttatggaagttggagcggttgagttgttactggtcctggtggttttgtgtatttgagtttgttaacattctgctaaattatcgtgggtcgcaggcccaggtatgggagatatgatgaagcaggcattacgagtagcatttggttttctgatgctgtgggcggcggtgctgcacgcagaagtccgtatcgagatcacccagggggtggactcggcgcgaccgattggcgttgtgccttttaaatgggccgggccgggcgctgcgcctgaagatatcggcggcatcgtggcggcagatttacgtaatagcggtaaatttaatccgttagaccggtcccgactgccgcagcagccagccaccgctcaggaagttcagcctaccgcatggtctgcgctgggtattgatgccgtcgtcgttgggcaggtaacgccgaatccggacggttcctacaatgttgcttatcagctggttgacactggcggcgcgccggggactgtactggcgcaaaattcttataaagtgaacaagcagtggctgcgttatgcaggtcataccgccagtgacgaagtctttgaaaaactgacgggcattaagggcgcgttccgtactcgtatcgcctatgtggtacagactaatggcggtcagttcccgtatgaactgcgtgtgtcggattacgatggttacaatcagtttgtggtgcaccgttctccgcagccgttgatgtctccggcgtggtctccggacggctcaaaactggcttacgtgacatttgaaagcggtcgctccgcgctggttatccagacgctggcaaacggcgcagtgcgtcaggttgcgtccttcccgcgtcacaacggcgcgccggccttctcgccggatgggacgaaactggcgttcgcgttatcgaaaaccggaagtctgaacctgtacgttatggatcttgcttccggccagattcgtcagataacggacgggcgtagcaacaatacggagccgacctggttcccggacagccagactctggcctttacctctgaccaggctggacgtccgcaagtgtataaaatgaacattaacggcggtgcggcgcagcgtattacctgggaaggttcgcaaaaccaggatgcggatgtcagcagcgacggtaaatttatggtaatggtaagctcaaataacgggcagcagcacattgccaaacaagatctggtgacgggtggcgtacaggttctgtcgtcaacgttcctggatgaaacgccaagtctggcacctaacggcacgatggtaatctacagctcttctcaggggatgggatctgtgctgaatttggtttctacagatgggcgtttcaaagcgcgtcttccggcaactgatggtcaggtgaaatcgcctgcctggtcgccgtatctgtgataataattaattgattactaaaggaattaaagaaatgcaactgaacaaagtgctgaagggcctgatgattgccctgcctgttatggcaatcgcggcatgttcttccaacaagaacgccagcaatgacggtagcgaaggcggcatgctgaacggcgccggcactggtatggacgctaacggcaacggcaacatgtcatctgaagagcaagcgcgtctgcagatgcagcagctgcagcagaacaacatcgtttacttcgatctcgacaagtacgatatccgttctgacttcgcggcaatgctggatgcgcacgctaacttcctgcgtagcaacccgtcttacaaagtcaccgtagaaggtcacgcggacgaacgcggtactccggagtacaacatctccctgggcgaacgtcgtgctaacgccgttaaaatgtacctgcagggtaaaggcgtttccgctgaccagatctccatcgtttcttacggtaaagaaaaacctgccgtactgggccacgacgaagcggcttacgctaagaaccgtcgcgctgtactggtttactaagagaattgcatgagcagtaacttcagacatcacctgttgagtctgtcgttactggttggcatagcggccccctgggccgcttttgctcaggcgccaatcagtagtgtcggctcaggctcggtcgaagaccgcgtcactcaacttgagcgtatctctaacgctcacagccagcttttaacccaacttcagcagcagctctccgataatcagtccgatatcgattctttgcgcggccaaatccaggaaaatcagtatcaactgaatcaggtgatggagcgccagaagcaaattatgctgcagctggggagcttgaataatggcggcgcagcgcagccagcagctggtgaccagagcgggacggcaaccactgcgacccccgccccggatgccggtacggcaacctcaggggcgccggtacaaagtggcgatgcgaataccgattacaatgcggcaattgcgctggtgcaggataagtctcgccaggatgatgcgattgtggcgtttcagaacttcatcaagaaataccctgattctacttatcagccgaacgccaattattggctgggccagttgaattacaacaagggtaaaaaagatgacgccgcctattatttcgcctcggtagtaaaaaactatcctaagtcgccgaaggctgcggacgcgatgtacaaagttggcgttatcatgcaggacaaaggtgatacggcaaaagcgaaagcggtttatcagcaggtgattaacaaatatcctggcactgatggcgcgaaacaggcgcagaagcgtcttaacgcgatgtaatgcgtaccatgcgaccagaaaacgccttttttctggtcgcgtcgtgcgattcctaagcagttgagccctctgcgtcgaaatttttgttgcgctcaaatctgaaatcagtaatatatgccgccgttgccacgggatattaaacaactcgaaagcaacgcaaaagtgggtcgttagctcagttggtagagcagttgacttttaatcaattggtcgcaggttcgaatcctgcacgacccaccaatcgttcggtggaaacgagaataaaacgtgaaggataacgttgcgtcagcaacggcccgtagggcgaggcgaagccgagtcatcctgcacgacccaccactaacttcggttagtcagtaatatccagcgtagtatcgggtgattagctcagctgggagagcacctcccttacaaggagggggtcggcggttcgatcccgtcatcacccaccacttgggtcgttagctcagttggtagagcagttgacttttaatcaattggtcgcaggttcgaatcctgcacgacccaccaatttaacatcaaactcagatgttgaacgtgaaggataacgttgcgtcagcaacctgtagggcgaggcgaagccgagtcatcctgcacgacccaccatctttagatggtccgagtaaaatctttcaggcagcacccgtatgggtcgttagctcagttggtagagcagttgacttttaatcaattggtcgcaggttcgaatcctgcacgacccaccaatatacaaggtggtaactggtagagaacgtgaaggataatgttgctttagcaacggcccgaagggcgaggcaaagccgagtcatcctgcacgacccaccatcctgaatgattgaagcagtaacccttatccaaggggtcgttagctcagttggtagagcagttgacttttaatcaattggtcgcaggttcgaatcctgcacgacccaccaatgtaaaaaagcgccctaaaggcgcttttttgctatctgcgatatggaagattcgaacctaccgcaggtccgggtctcacgtagtgagacaacggagccgcttgcggcgacggcccgaagggcgagcaaagcgagtcatcctgcacgacccaccaatgtaaaaaagcgccctaaaggcgcttttttgctatctgcgatatggaagattcgaacctgccgcaggttctggactcacgcagtgagacaacggagccgcttgcggcgacggcccgaagggcgagcgaagcgagtcatcctgcacgacccaccaatgtaaaagagggcgctggcggcgcctttttgctatctgcaatatggaagattcgaacctgccgcaggtttgggtcttgcctgatgcgctgcgcttatcagacctacagacggcaccgctcacgtaggccagataagacgttacgccgccatcagatatggggctacgtaattattgtgactttccttattgaatcagctatcttgtttagcatataaaacaaattaaccgattgtggcgtttgttacgctttcattcggttatttcgttaagtcagtaaaacgagaaaccacgatgagcgtaatgtttgacccacaagccgcaatctacccgttcccgccgaaaccaacgccgttgaacgacgatgaaaagcaattttatcgtgagaaaatcaagcgtttgctcaaagagcgcaatgccgtcatggtggcgcactactacaccgatccggaaattcaacagttagcagaagaaaccggcggctgtatttccgactcgctggaaatggcccgtttcggcgcgaagcacgccgcatccacgttactggtagcgggcgtacggtttatgggggaaaccgccaaaatcctcagcccggaaaaaaacattcttatgcctacgctggcggcggaatgttcgctggatttaggctgcccaatagacgaatttagcgctttttgtgatgcgcaccctgacagaaccgtagtggtctatgctaacacctcggctgctgttaaagcgcgtgcggactgggttgtgacctccagtatcgccgtagaactgattgagcatctggatagtttgggggaaaaaattatctgggcgccggacagacacctggggaattacgtgcaaaaacagaccggggccgatgtactgtgttggcaaggggcgtgtatcgtgcatgacgagtttaaaacccaggcgttgacccgtttaaaaaaaatctatccctatgccgctcttctggttcaccctgaatcgccgcagtccattgtcgagatggccgatgcggtgggctccaccagtcagcttattaaggcggcaaaaacgctgccgcacagacagcttatcgtggcgaccgatcgcggcatcttctacaaaatgcagcaggcggtgcctgaaaaagaactgcttgaagcgcccacggctggcgagggggcgacctgccgtagctgcgcgcactgtccgtggatggcgatgaatggcctgaaagccattgctgaagggctggagcagggaggcgcggcgcatgaaatacaggttgatgcggcgctacgcgagggcgcattactgccgctcaaccggatgctggattttgcggctacacttcgggcgtaaagacggaaatctttgggggagagaatggatttttttagtacgcacaacatactgattcatattccgattggcgctggcgggtacgatctctcgtggatcgaagcggtaggaaccatcgccggcctgctctgtatttggcttgccagtctggagaagatcagcaactacttttttggactggttaacgtcaccctgtttgcgattattttctttcagatccagctttatgccagcctgttgctgcaactctttttctttgccgccaatatttatggctggtatgcgtggtcgcggcaaacaaaggataatgaagccgagcttaaaatccgctggctgccgttgccaaaagcaatggcatggctggcgatatgtgtgatagctatcggtttgatgacgcgatatatcgatcccgtattcgccgtcctgacgcgcgtggccgtcgccattatgcagatgctggggttacaggtgacaatgcctgtactgcaaccggacgctttcccgttctgggactcttgcatgatggtgctgtctatcgtggcgatgattttgatgacacgcaaatatgtcgaaaactggctcctgtgggtgataatcaacgtaatcagtgtggtgatttttgctttgcagggcgtctatgcgatgtcgctggaatatctgatcctgacatttatcgccgtgaacggtagtcgcctgtggataaacagcgcgcgggagcgaggatcgcgcgcgctttcccgttaatggtgatgaacatgcccggatggcgtctgattcagatgacagtccgggccgtgacacacttgatactccatctgaatcgtagcgtgcgcaatatggtattcgtgcatcaggaaatcctggatacgttccagcagcgcatcatggtcgtgtggcggaatgacctgagcgtgcaatgtcatgaccggtttttcgccgaccatccagacatgcacatggtgtacgttgcggacttcggggatttcccggcttaaatggcgctgtaaggcattaatatccagtgaaaccggcgcgccttccagcaattcgttgacgctatcttttaacaaacgccaggcgctgcgtagtaccagtaccgaaaccagaatagagagaatcgggtccgctggcgtccagcccgtccagataatgatcaacgcggcgactattgcgccgacggaacccagcaaatcgcccatcacatgtagcgcggcagcgcgcacgttcaggtttttttcatcgcttccccgatggagtatccagaacgcaaacaggttcgccagcagacccgcaaccgcaattaccatcatcagattgcccgccaccggacgtggcgtgtaaaagcgctctatcgcttcccagacaatgagaagggtaatgaccaccaacgcaatggcattcacaaaagccgccagtgtggtgagtcttagccagccaaaagtgtggcgaacagtcgggggacgacgggaaaattgaaccgccagcagcgcaaaaagaagggccgccgcgtcggtgagcatatgtcccgcatccgccaacaacgccagagagccggagagtatcccgcccaccacctcaaggagcataaatccggcagtgacgataaaggcgaaaagcaggcgacgagcattattatctttcggcaggtgtgaatcggcatgagagtgtgagtgcgccataacgtcattcctttgttattctcatcaatactgtagacatcatactgatttttcgctgacaaaataaaaaggagagcgaaagctctcccgttatcagacttttttctgcattactgtgtggtaccgtcggttttggtattcacgtcattattgacgccattaccggtttccacttttttattaatatccgggcagcgaccgtctttacacatggtatttttatgctcttcatccttggtcattccgtcatgattcatggttgaaccgtctggatgctgcatcgtgctgttagtattgccgttggtattgatgtcgttgttattcacatcattcggcgccacattctggcgggcgtccggggcaacctgaccggcatttgccgccgagttcgcctggccattactggattgcgcgttagattcagcagctaacgctgtgccgctggcaaggccgagggtagcggtgagtaaaagcgtagtcagttttgtcattttcataagatgctcctgttatggtggatatgtcggataacctcttccaacagtgcacgtgtcagtcaaatcctcaaataagggataaaaaacgttcgccgccgcgggttaacgcagcagagaatcttgcaataattcataaacagagtggttacagttaaaaagtgtaggttagatcccatttttcgctacatttgtgcgtttttttcctgaattccaggattattccgttcaaagtgtaaaagcccgtttacactatttaattgaagagatagattggagggattgcattcattgggataagtacggcaacactggaataaacatgaattatcagaacgacgatttacgcattaaagaaatcaacgagttattacctccggtcgcgctgctggaaaagtttcccgccacggaaaatgcagcaaataccgttgctcacgcgcgcaaagccatccataaaattctcaaaggcaatgacgatcgtctgctggtggtgatcggtccttgttcaattcatgatccggcagcggcgaaagagtatgccgcccgtttgctggcgctacgtgatgagcttcaaggcgagcttgaaattgtcatgcgcgtctattttgagaaaccgcgtaccaccgtcggctggaaagggctgattaacgatccgcacatggataacagcttccagattaacgacggtctgcgtattgcgcgcaaactgctgctggatattaacgacagcggcctgcctgccgccggcgaattcctcgatatgatcacgccgcaatatctggccgatctgatgagctggggcgccattggcgcgcggactactgaatcccaggttcatcgcgaactggcgtctggcctctcttgtccggtcggttttaaaaatggtactgatggcacgattaaagttgccattgacgccatcaacgccgccggcgcgccgcattgcttcctctccgtcactaaatggggtcattcggcgattgtgaataccagcggcaacggcgactgccatatcattctgcgcggaggtaaagcgccaaactatagcgcgcaacatgttgctgaggtgaaagaaggcctcatcaaagcgggactgacgccgcaggtcatgatcgatttcagccatgccaactcctgtaagcaatttcaaaagcagatggaggtttgcgccgatgtctgtcagcagatagcgggcggtgaaaaagcgattattggcgtgatggtagagagtcatctggtagaaggaaaccagagtctggaaagcggtcagccgctgacctacggtaaaagcattactgacgcctgtattggctgggaagataccgatgcgctgcttcgtcagttgtcggcagcggtaaaagcccgtcgcggctaagtttagtttctatcctgtggtgaagtgcaggatagaaaacatatcggtccggtaacagcctaccggaccgatattgccaatattaatgtattattatttggcgtacttgggtacttcctgcttctggagagtatttccttccgaatcaattcctacaatgactctatagcggtcaaaatataacttcttaatggattctgttcctaattcttcgtaggcaacaatttctactgatttaacatgttttgtattaattgcagacgctcctccaatcccgagtagcgaaaccccaccgtattttttacaaagctcagcgacataatcagcacgatcgcctttgccaagaaacgcagttgccccttgttgaaacatcatttctacaaatgggtccatacgcgcggccgttgtaggaccgttggagccaataggtaaaccaggtctggcagggcaggggccagcatagtaaatcgtttggttttgaaaatcgaccggtgatttttctccgttactaagcgctacttcgatttttttatgcgcggcgtcacggcaggtgtaagcaaatccagtgagaaataatatatcgccgaccttaagagttttcgctttctctttagtcaatggtaatgttaattccatcatagcttctccaggtattaaatgatttcactagcgtggcggcttgcattacattggaaattgattgcgactggcagtgcagtgatatggcaaggatagtaatcgacatgcacgcctaacgccgtaatacgcccgcccatacctaaagggccgatccctgtattattcacggcctctaataattcagcttcgagctgggcataaagtggtttagcattgaactcaccaagagggcgtaataatgctttcttagccatccacgaacagtgatccattgtaccgccaacgccgataccaataatataaggagggcatggattgcctcctacacgacggacagtttccagaacaaaatcttttataccatcaataccatcgccgggaagcaatgttttaaaagttcccatattttcgctaccgccgccctttggcataacggtaattgtcactcggtcaccatcaacaatttcagtatgtaaaattgcaggagtattatcattagtattaatacgttctaatggatctgcaaccatggattttcttaagtatccattttcatagccctggcgaacaccctggttcacctgatctttaagcggcttaccttcccagcatacatgttgtccaatttccattataacgatacaagtgccggtatcatggcagcatgcaagttgttctttttttgcatactctccattatcaattaatatcttaatggtttccttgccgatctttgactcttctttatcatatgctttacgaaaagaacacatgagattatcatccagttcataacaagctttttttacaagtttttcgataaccgaaatgataatttctgtatttaatatacgactcatactccctccagtgctatgttgcattgttttatccattgatcacattttcatgatattcgtattcattgtaggaaggaaatatgttatttttattaaatgataaattttatttatagtagtggaaaatagatggaaattagacaattagaatattttgtaagcgcttctttgttaggtaacttaaccagagttgctgagcggcattttgtttctcaacctaatatcaccattgctattaagaagttagagactgaattaggggtgacattatttgatagaaagaaaaataaacttgtccttactgaggagggcatgtttttcttacaaaaaattgaacctatccttattgcgttaaaaaatagcgtagcggaaatgaaagattatcgtaatgaaaatggtggcatagtaactttggggatcccaccgatgataagtttgtttcttttttcaccgctcttcaagcatttccgagagatttatccagagatggaactctctcttgttgaagaggggacttttggtttacatgataaactttctgctggagagctggatcttgctattgttattattaatgactgtccaaaagaattagttacggtaccattaatgactcagcagcacgtggtatgtatgtcagataaacatcccctggcaaaaaaggatagtatcgattgggaagatctacaatatgagccattgatactaatgaaaaaagattcctggcatagaaaaacgattattgaagaatgtacaaagcgaggaattcatacacatatttttctatcatcaaacagggttcaaaccaacatagatctggttgctaaaaatgaaggaatttctttcattttggacgctgtcgatcttaaagccgaaaaagtaataaccaaggccatgactgagccgacttatgttacgattggtttggcctggaagaaagataaatatttatcatatgcaaccagagcgttaattaaatttattgaggattatattaaagaacattttacaattaaataattatatttgttcttcaacaaaaatttcccatagctcttcggcatctggaggcattctcttggctggtctataaagtcttatttctatgggtacccataaattgctttctttttccgctgcagtaacaatagttttagcctctatatcttgcctggcaaggctttgaggtatccaggcaacaccatcgccagatctgaccattgccaatagtgttgctgccagatcggccacaaaggcaacatttatattatgggtaattctgttaatagacgctgtatttgctattattcttcccagacctgattgtgatgaaaaagaaaggtaagggaattgaatcttattatttatattccacaacggttttaacgtttctgagtctggtttactgaatggaattaatgtatcaaacccaagacgaatgctcataaagttatttttatttaaatttagatgcatatgtgggtgatggtgacacagcaaaaattgtgaatctccctgccgcatcattttttcgcacgcattcaatgagtcagataaaagacgaaatgaaccaaattttgcaattttatcactttgctttaacaagtgcggtacaaaagagaaagacaaagcatgcgttgctgaaaaaacaagactaggttgtttattacctgcagcctcaagggtatcacttttcaatgtgtacaaggagtggatcagttcgggaagctggtctgtaaatacttctccggccttggtaagggtgactccccgtttacttctttcaaaaaggggcgtacccacccattcttcgagagattgtatccgacgactaaatgcgggttgagtcacatatcttgaggcagacgcttttgagaaattcaacgtttcttttagagccagacagtcttcgagccatgttagttcgaggtgatgccgatattgcataagctgcaaccttattagcattggatgagtttcatttatataagtagcattatacacagacagattttaagaggaaattatttgattaaacagaaacaaaagcagtaagaatatgttattcctttgtcgggtaagtgttgttatttatgtgagtgtattctttctcaatagaaattaattagatgtaattttagtataacatgtgatttatgcttgttgcagttgtattcatgactgtaatgagttgtttttgtaccctaataatataaggacgtatacatgtcaccagcgattattactttgttggttttagtggttgcaataattatctttgttagcgatcgtcttcctatgggattagttgcatttatggtcccaatggcactttattttaccggtgttatcgatgctaaggatatttttgcttcaatcgtaaatgcgaatgttattcttatcgtcgccatgtgtttactcggtgcggcattttttaaaacaggtttggcatggcaatcaagtaaaattttactaaaatatgctaaaacagaaagaagccttagtgtattgatttttcttattggtggagttatgtctgcctttgtttctaatagcggaacagttgctgtgctaattcctattgttttaggtattgccgccagtagtcagattaagcctattaaacttcttatgcctctggtttttggggcaacaatcggtgctgatatttctattatcggttcgccaggaaatctgattgctaaaaatactattgaaacttttagtaagggaagtctgtcggtgccatttttcgaatacgctaaaattggtattcctttgctgattgcatgctctatatttctctatttcttcggttcaaaactcatcgcagatcgtgatggaaatacacaatctgattctcaaatggattatagccaaattccggcctggcatagaaatttaactttagccgtttttattctgtctatcgctggaatggtggcaactgattatattaagtttctgcctccaatgcatattattgcgtgttgtgcggctattgttcttgtatttgctggcgttttgacacaaaaggaaacttttaattcttttgaaacactaactgttttcatgcttgcgtttatgatgcctttaggagccgcgctgaattctactggtgctggagaaatgattgctaatgccgttatttcagtaaccggagattctggcgttatgattattatggcgtcattgtggatacttacatgggctttgactcaagttatgagtaacactgcagcatgtacgttgttatgcccggtaggatgaactatcgcacagtctattggcgcagaccctcgtgcagttgttattgctgtttttattgcgagtagtgttgctgtttgtaccccaatggctattccagcaaactcaatgattattggcccggggaatgttaaatttaaagattttttaaaacccggattggcgattagtttggtttgttttatcgttagtatgattttactaccgatattttatcccttctattaatgcctgatattacttttctattttagattattaaatttgagactttattatgaatagttcggtgctattaggtgaaggcttcaccctgatgttcctcggcatggggttcgtgctggcgtttctgttcctgctgattttcgccatccgcggcatgtccgccgccgtcaaccgcttcttccctgaaccggctccggcgccaaaactggcacctgccgccgccgcgcccgcggacgactttgcccgcctcaagccggtgattgccgccgctatccaccaccatcgccgccttaacccttaattcccggaggaatccatgaccattgccattaccgacgtcgtcctgcgtgacgcccaccagtcccttttcgccacccgtctgcgccttgacgatatgctgccgattgccgccgcgctcgatgacgtgggctacgggtcgctggagtgctggggcggcgccacctttgacgcctgtatccgctttctcggcgaagacccgtggctgcgcctgcgcgaactgaaaaaagccatgcccaaaaccccactgcagatgctgctgcgcggccagaacctgctcggttatcgccattacgccgatgacgtggtggaacgcttcgtcgaacgcgccgtcaaaaacggcatggacgtgttccgcgtcttcgatgccatgaacgacccgcgcaatatgaaagccgccctgcaggcggtacgtagccacggggcgcacgcccagggcacgctctcctacaccaccagtccggcgcacaccctgcagacctggctggatttaacagagcaactgctggaaaccggcgttgactcgattgccatcaaggatatgtccggcattctcaccccgatggccgcttttgagctggtgagcgaaatcaaaaaacgctacgacgtacgtctgcacctgcactgtcacgccaccaccgggatggcggagatggccctgctgaaggctatcgaggcgggtgttgacggcgtggacacggcgatttcgtccatgagcgccacctacggccacccggccaccgaagcgctggtggcgacgttggcaggtactgagcatgacaccgggctggatatcctgaagctggaaaatatcgccgcgtacttccgcgaggtgcgcaaaaagtaccacgcctttgaaggccagctgaaaggctacgacagccgcatcctggtggcgcaggtgccgggcggaatgctcactaacctcgaaagccagctgaagcagcagaacgcggcggacaaactcgaccaggtgctggcggaaatcccccgcgtgcgcgaggacctcggctttattccgctggtgacccccacctcacagattgtcggcacccaggcggtgctcaacgtgctgacgggcgaacgctacaagaccattgccaaagaaacggcgggcattctgaaaggcgaatacggccacaccccggtgccggtgaacgccgcgttacaggcccgcgtgctggaaggaggcgctccggtgacctgccgcccggcagacctgctgaagccggaactggctgaactggaagcggacgtcaggcgccaggcgcaggagaaggggattcagcttgcgggaaacgccatcgacgacgtgctcaccgtggcgctgttcccgcaaatcggcctcaaattcctcgaaaaccgccacaacccggcggcgtttgagccactgccgcaggcggaagccgcgcagccggtgacaaaagcagagaagcctgccgcttccggtatctacaccgtggaagtggaaggcaaagcctttgtggtgaaggtcagcgacggcggcgatatcagccagctcactgcggctgcacctgctgcctcttctgctcctgccaccgccccggcaggcgccggcaccccggtcaccgcgccgctggcgggcaacatctggaaggtgattgccaccgaaggccagacagtggccgaaggcgatgtgctgctgattctggaagccatgaagatggaaaccgaaatccgcgccgcgcaggccgggacggtacgcggtatcgcggtgaagtccggggacgcggtttccgtgggcgacaccctgatgacgctggcgtaacggagaactgaaatggaaagtctgaacgccctgcttcagggcatggggctgatgcaccttggcgcaggccaggccatcatgctgctggtcagcctgctgctgctgtggctggcgattgcgaaaaagttcgaaccgttactgctgctgccgattggcttcggcggcctgctctccaacatcccggaagcgggtatggcgctgaccgcgctggagagcctgctggcgcatcacgacgccgggcagctggcggtgattgccgcgaagcttaactgcgcgccggacgtgcacgccattaaagaggcattagcgctggcgctgccgtcggtgcagagccagatggagaacctggcggtggacatgggctacacgccgggggtgctggcgctgttctataaagtggcgattggctccggcgtcgcgccgctggtcatcttcatgggcgtcggcgcgatgaccgacttcggcccgctgctggccaacccgcgcaccctgctgctgggggcggcggcgcagttcggtatcttcgccaccgtactgggggcgctgacgctgaactacttcggccttatcagcttcaccctgccgcaggcggcggccatcggcatcatcggcggcgcggacggcccgacggcgatttatctgtcgggcaagctggcgccggagctgctgggggccatcgcggtggcggcgtactcgtacatggcgctggtgccgttaatccagccgccgattatgaaagcgctgaccacggagacggagcggaaaatccgcatggtgcagctgcgcacggtgagtaagcgggaaaaaatcctcttcccggtagtgctgttactactggtggcgctgctgctgccggacgccgcgccgctgctggggatgttctgctttggcaatctgatgcgtgaaagcggcgtggtggagcgtctgagcgacacggtacagaacgggctgattaatatcgtcaccatcttcctcgggctgtcggtgggcgcgaagctggtggcggataagttcctgcagccgcagacgctgggcattctgctgctgggtgtgattgcgttcggtatcgggacggcggccggggtgctgatggcgaagctgctgaacctgtgcagtaagaacaaaatcaacccgcttatcggttcggcgggggtgtcggcggtgccgatggcggcccgcgtatcgaacaaagtggggctggaatcagacccgcagaacttcctgctgatgcacgcgatgggcccgaacgtggccggggtgattggctcggcgatagccgccggggtgatgctgaagtacgtgctggcgatgtaaatctgttcctttcccggaggcggcgcgttgcgcctgtccgggctaccggattgcatggatctgtagcccggacagatgcgcagcatcgtctccgggaatgtcccataaggagactttgatgaatgaaaccatagcatttcgtccggaaggccgggcatcgataaaagatgtggttgtcaattatacgctggcatcactggacgagcttgaacaactgcacccggcgctgaatctgctggcgcacccgtcaattgtccgtggcagccatgatttctttgtctgttgttataacgcgggcgtacagcatgcgcaggccggggcggctgaaacggtagcggttttgcctgattcactgccacaagaacggcaaaggagcgggctgctgtgtgccgcagcaggtcgtctggatgccctgcgccagccgctgacgcacaatcgtttatgtgacctggccagtcagttctgtgctggcatggcagatgttgacagcgaaacccgcagcggtttttataccgtgcgcagcatatcgctgccggtttaccggcggctgttgcgggatcaacattctcacggtgtctgcctgcagcaggctctactgcacctgctggcctggaagagcgattccccctgggcgcggcagcaggcgcagcggctgctctggcagggcggcgtgctgggcgataaaggtgagtttgcgcttatgacgctggatgatgaactgcgggagcgccagattgagtggcccgggctgtggtcgctgctggccgtcaccgggtttctggcgaaattccctgccggaccgatatttgctgactgaaaaatgaggactgctgacaattatctgttgtgttggcatttctgcgagaggcagctagcgctttgcctgacttacgaaacgagaatatcaacagattacgtactttttgtaggtccgtggttggaacattgccacctggttacattttgtcaacagcctcaagcgtggatggctccacgctttttttgtctatggaaaacccccagccaggccctgtgtcttgatcaggagatctgatcaagacacagggctatgccggaggatatttattggaaaccggtgagataggccaccgtgtcattaatcgaaatataaataaatatataacgaaataattcggcgctataattctcctctgattaataacgtagcccgaaccatgacctgtcaggacaaatcacttttagcccccgctctcgcttccacgcccgtcattccgcgctatcgccagatcatacgcaaacgggctgtgctcatgttagctattgcgttggcgatgatgacttcactgatggtggatgtaacctgtgggtcttctggtttaccgctcagtgcgctatggcaggcgctttttcaaccggaaaaggtgaatgcgggcatacacgttattgtctgggatattcgtttaccctatgccctgatggccctactggtgggcatggcgttagggttagcgggcgccgaaatgcaaaccattttaaataatccgctggcgacgccgtttaccctcggcgtatcgtccgcggcggcttttggcgctgcgctggcgattgtgttggggatcggtattcccggtattcctgccgcctggtttatcccggccaatgcgttcatctttgcgcttttatccgcgttactcctggacggtattacccgttggacaggcgtcgccgcatccggagtggtgttgttcggtattgcactggtattcacctttaacgcgttggtcgccattatgcagtttgtggctgatgaagatacgctgcaggggctggtattctggacgatggggagcctggtccgcgcgtcgtgggaaaaattgggcgtactggccgtggtgtttattgctgtgcttttttgcgcgttacgaagcgcctggcaactcacggcattacgtctgggcgaagagagggcgatgagctttgggattcatgtccgccgtttacgcctgctgtcattgttgcgtatcagcttgttatcagcgctggcggtagctttcgtcgggccgattggttttattggtctcgttgcaccgcacattgcacgaatacttttgggggaagatcaccgtttctaccttccgggcagcgtgctgataggcgggctggtgttatcgctggcctctattgcggcgaaaaatagtattccgggcgtcatggtgccggtggggattgtcacctcgctggtcggggttccgttctttttaagcattgtattgcgacatcgggggagtctctgatgcgcgggttaatgctccgctcatttagcgccggctattccactcagccggttattgcagatctcaacgttcccttactgccgtgcgggaaaattaccattttgctggggccgaacggctgtggtaaatcgacgttactacgttcgctggccgggctgaataacgccgacggcgaggcgctgcttgatggcgaagatctcatgtcgttatcgtttgccgagcgggcgcagaaagttgtgtttttgccgcagtcattaccgcagggcgtacatctgcatgtactggagtcgattatcgtggtactgcgggcatcaggcggcagagacaatgcgcagggcagagcgcagatactggctatccttgagcaattgggcataacgcatctggcgttgcagtatctcgaccagctttccggcggtcagcggcagttagtgggtctggcgcaatcgctgattcgtcgccctgaacttctgttgctggatgagccgctcagcgcgctggatttaaactatcagtttcacgtaatggatctcgtgcgtcgggatacccaggcgcaaaatagggtaacgatagtcgtggcgcatgacattaatattgcactgcgtcatggtgaccatgtcctgatgctaaaagacggcaggctggtcgccagcggcgcgccggagacggtgattactgcggagcgtctggctgaagtgtaccgggtacgaggacgcgtggagcgctgttcgcaggggaaattgcaggtggtgctggacggcgtgatcgctgtttaagacatattgcctgatggcgctgcgcttatccggcctacccattgctcgtaggccggataaggcagttataccgccatccggcaaaggtgattacttcgctttaccctgattcgccacggcagccgctttcgcggcgatttcgtcagcgttgcccagatagtaatgtttgagcggcttgaagttttcgtcgaactcatacaccagcggcacgccggtcgggatgtttaactcaaggatctcatcttcactcatgttatccaggtatttcaccagcgcacgcaatgagttaccgtgagcggcgatgatcacgcgctcaccgctcttcatacgcggcaggatggtgtcgttccagtaaggaataacgcggtcgatggtcagcgccagactttcggtcaacggcagctctttctcgctcagtttggcataacgtggatcgtgacccggataacgctcatcatctttggtcagttccggcggcgtcacggcaaaaccgcggcgccactgtttaacctgctcgtcaccatatttttctgccgtttccgctttattcagcccctgcaacgcgccatagtgacgttcattgagtttccaggatttttccaccggcagccacgcttgatccagttcatccagtacgttccacagcgtatggatagcgcgtttcagtacggaagtgtaggcaaaatcaaagctgaaaccttcttcttttagcagtttacccgctgcttttgcttcgcttacgcctttttcagacaggtcaacatcataccagccggtgaaacggttctctttgttccattgactttcaccgtgacgtaccagaaccagcttagttacagccatactctcactcctataaatcatatgtaatgataataattctcattatattgccgcgaggtgttggcggcaatgcttacgcataaccatagcgaaaatagtggcgcagtgtaaggttcttgtgaactcagagttgcgattttgtctttaagtggtggaggtttgagcagggcaatggcgcgtaggcccgataagcttgcgtcatcgggcatgtagcggcatatcgttagaacggaataaactgatactcggtcaggctggcgtactcctcgccagggcgaaggatacagtcaggctgcggccattcaggatgattcggactgtccggcagcagttcgctttccagcgccagcccttgccagtcggcataaggttccggcccgcgggaaggtgtacccgccagataattgccggaataaaactgcaacgccggggcggtggtgtaaaccatcatttgtagctttccatcctgtgaccacagacgggccgccggctttttgccatcaccctgcgtctgtagcaggaaagcatgatcgtagcctttaaccttgcgctgatcgtcatcggcgagaaattcactggcaatgacttttggcatccggaagtcaaacgaggtattggctaccgattttagcccctggcgtggaataccggattcatctaccggcagatactcatccgccagaatttgcagcttatgttggcgcacgtcggtccgatcgccgtccagattaaaatagacgtggttggtcaaattcaccggacagggtttattgaccgtcgcccggtaggtgatggatattctattgtcatcggtcagacgatattgcgccgtggcgcaaagatggccaggaaagccctggtcgccgtcatcagaggtgagcgcgaataatacctggcgatcgttctggttcacaatttgccagcggcgcttgtcaaagccttccggtccgccgtgtagctggttctcgccctgacttgggcttaactgtacggtttcgccggcaaacgtatagcggctattggcgatacggttcgcgtaacggccaatagaggcgccgaggaatgacgtctgttcagggtagtgttccgggctggcgcagcccagcaatgcttcccgaacgctgccgtcagacagcggaatacgggcggaaagaagagtggctccccagtccatcagcgttaccaccatccctgcgctgttgcgcagggttagcaggcggtacggttgaccatcgggggccagtgcgggcgtttcatttagcactgtcctgctccttgtgacggtttgcatacataaaaggtttctttgattccggttttcgcttcgtactgttgcgcaacggcctgctgcacagcgggaaccagatcttccgggatcagcgcgacaacacacccgccgaagccgccgccggtcatgcgcacgccgccttgatcgccgatggtcgctttgacgatgtctaccagtgtgtctatctgcgggacggtaatttcgaaatcatcgcgcattgaggcatgggactccgccatcagttggcccatacgttgcaaatcacctttctccagcgcgcttgccgcttcaacggtgcgcgcattttcgctcaatacatggcgaacgcgttttgcgactaccgggtccagttcgctggcaacggcattgaacgcctcaaggctgacatcgcgcagggccggctgctggaagaaacgggcgccggtttcgcactgttcacggcgggtattatactcgctgcccaccagcgtgcgcttaaagttactattgatgatcaccacggcgacacctttcggcatggaaaccgctttggcgccgagcgtacggcaatcaatcagcaacgcatgatcttttttgccgagcgcagagatgagctgatccataatgccgcagttacagccgacaaactggttctcggcctcttgtccgttgagcgcaatttgcgcgccgtccagcggtaggtgataaagctgctggaagacggtgcccaccgccacttccagcgaggcggaggagcttaacccggcgccctgcggcacattgccgctgatgaccatatccacgccgccaaacgcgttgttacgctgttgcaggtgtttcactacgccgcgcacatagttagaccactgctggctatcgtgggtcacgatcggcgcatccagtgaaaattcgtccacctgattgtcgtaatcggcggcaatcacccgtacggtacgatcgtcgcgcggcgcacagctaattacggtctggtaatcgatagcgcagggcagaacaaaaccatcattgtaatcagtgtgctcgccgatcagattgacgcggcctggcgcctgaatcgtgtgggtagcagggtagccgaaaatttcagcaaacagcgcgcgcgttttctctttcagattcatttttatactccggattcgcgaaaatggatgtcgctgaccgcgcgcaggcgttcagccgcttgttctgcggttaaatcacgctgggtttccgccagcatttcatagccgaccataaatttacggacggtcgcagagcgcagcagcggcggataaaagtgcgcgtgcaactgccagtgcgcgttttcttcaccgttaaacggcgcgccgtgccagcccattgagtaggggaaggaacactgaaacaggttgtcataacgactggtcagctttttcaacgccagcgccagagagtcgcgctgctcgtcgcttaaatcggtaatgcgcaggacatgcgttttgggtaacagtagcgtttcgaacggccacgccgcccagtaaggcaccaccgccagccagtgttcggtttcgaccacggtgcggctgccgtccgccagttcccgctggacataatccaccagcattggcgagcgctgctcggcgaaataggctttttgtaaacgatcttcgcgttcggcctcattcggcaggaagctgttggcccagacctgtccatgcggatgcgggttcgaacagcccatcgccgcgcctttattttcaaagacctgcacccacggataggttttgcctaactcggcggtctgcgtctgccaggttctgacgatttccgtcagcgcgggcaggctcaactccggcagcgttttactgtgatcgggagaaaagcagatcacgcggctggtgccgcgcgcgctctgacagcgcatcagcggatcgtggctgtccggcgcatccggcgtgtcggccatcagcgccgcgaaatcgttagtaaagacgtaagtccctttgtaatcgggatttttatcgccggtgacacgcgtattgcccgcacacaggaagcagtccggatcatgggccggcagcatttgctgagacggcgtttcctgcgccccctgccaggggcgttttgcgcgatgcggcgaaaccagaacccactggccggtaagcgggttataacggcgatgcggatgatcgatgggattaaatggggtcataacaacgtccttaatctgggtatccctgcggatggcgtgactgccagtgccaggtgtcctgcgccatttcgtcaagcgtgcgggtgacgcgccagttcagctcgcgatcggctttgctggcatccgcccaatacgccgggagatcgccgtcgcgacgcggcgcgaagtggtaattaatgggtttaccgcaggctttactaaaggcgttgaccacatccaggacgctactgccgacacccgcgccgaggttataaatatgtacgccggatttgtccgccagtttttccatcgccacgacgtgcccgtcggctaagtccataacgtgaatgtaatcgcgtacgccggtgccatcctcggtcgggtaatcattgccgaaaacggcgagcgattcgcgacgacccacggcgacctgggcgatatagggcatcaggttattcggaataccttgcggatcttctcccatgtcgcccgacgggtgcgcgccgaccgggttgaaataacgcagcagcgcaatactccactccggctgggctttttgcagatcggtgaggatctgttctaccatcaatttacttttgccgtaggggctttgcggcgtgccggtaggaaaactttcgacgtaaggaattttgggctgatcgccataaacggtggcggaggagctaaaaataaggtttttaacgttggccgcacgcatggcgctgaccaaccgcagcgtaccgttgacgttgttgtcatagtactccagcggcctggcgaccgattcgccgacggctttcaggccggcaaagtgaatcacggtatcaatcgcgtgatcgtgcagaatttcggttataagcgcttcgttgcgaatatcaccttcgacaaaggtcgggtgcttaccgcccagacgttcaatcacgggcagcacgctgcgcttgctgttgcagaggttatcgaggatgacgacgtcatgaccattttgcagcaactgtacgcaggtatgacttccaatgtaaccgctaccacctgtaaccaatactctcataattcgctccgttaagcctatggtatggaataaccatagcataacaaagatgcgaaaagtgtgacatgtaataaattagtggaatcgtttacacactggtgattttacgcatttgtatcgattaaatgattacaaatcatctggcttgagaatacttctgctttttatccgaaaaaaaggcgcgttacgcgcctgggaatgaaacggacggggcaagagctgtcagtcttttttacgcgagagtagcttcctggcgagcgccccgacagcgacgacgccgatggcggtcactttccagaatttaagcaacgcgataccgagcatagcaagcagtcctactttcttggccgcgataccgccaatcagcgcggcgagcccatactccgctattttgtccgttgattcgttgaagtcagcgtagcgttgtccagcgttgaacttgacggaactgagaattcttttcgccagagggatttcgtggtcaacagagcctctgtcggtcaccagatttaaagaaaaatagccttcacgtcccagcagataggtgttgtagttcacgccttgttcattcagtggttcgttggtgccgatatcatggatggcggcggaccagatcagacgatgattggttgcatcgtaggtaggcttctcgatccagccaataatttctatcggctcaatgccttttgcaatacgatctttattcgcttcttttgtgcctttgcgcaggttatccattaattcatcggcatcccagttttttgcatcatcatcttttacataaccagaatcatcatattcgatagaaataaatccattcatttcctttttaaatacgaggccgtaaaaatattcatcgtcaacatagttaccaatttcacgcataaataccgccgcttcttttgcgggtatccaggtaaatccttccggcagattaagcgtggctttatcacctaaactaatctttgtcggacccgcaacggcggcgcgactcatgccttcaacagcgacctcaacggcggttttacgcgcttcctgcgcagcggtcggcttttgctcagcataactgctggggcaaaataacatggctgccagtaaaaatagtattatttgtggaaaacgaaaagccataatgaatcccttatattcacatacgacatcattgtcgaaaatttcaggattattatgacaatgaggcggtcagcgattcaagagatagtaagcttatcgaccgttattattattcttaataaaaggagagtggttccagaatggcgcgcggcgccattctgataatacatttaattattgcatcgtccggaaacgtacttataacgttcgccatctggtacaaattccagccggtgggtaatacaggcaggcgcatcctctgcatgatgggaaacgaacagcagttgggtctctccctggcgaattaatacatctacaaaacggcgtaccagttggcggttcagcgggtccaacccttgcagcggctcatccagaatcaacactgtcggatgcttaaccagcgcgcgcacgatcagcgccagccgctgctgtccccaggagagactgtggaagggggcatccgccgtacgcttatcgattcccagaatatccagccactgttgcgccagttttcgttgcctgtctgaaacggcctggtaaatgccgatagaatcgaaatagccggagagaatgacattgcgcaccgtggtactgacgcggtaatccagatgtaaactgctgctgacgtagccgatatgttttttgatatcccagattgtttcgccgcttcctcgccgccgcccgaacagcgtaagatcgttgctgtagccttgcggatgatcgccagtaataaggctaagcaacgtagacttacccgctccgttaggaccgacgatctgccagtgttcgcccggattgactcgccagcttaggtggtggaggatagggcgatcgttatacgagactacgccatcgttaagtacgatccgtggttcgccatcgggtaacgcatggcgggcggaaggttcgtccggttcgggtaattgtacgtcggtcagacgctcgctgtgcgcgagttgagcaaccaacgcccgttgcagcaactccgccgtcgttccggtctccgccagcgtacagtcggcaagcacgccggcaaactgcacgaagtccgggatctcatcaaaacggttgagtaccagcgccagggtcatacccgcctggttcaacgccgtcaggcgttgcgccagttgttgacgggcggtcacgtcaagcccgtcgaacggttcatcaaggattaataactccggctcagacatcagcgcctgacacagcagcgcttttcgcgtctcgccggtagaaaggtatttaaaacgcctgttgagtaaagtggaaatgccgaactgctgcgccagcatcgcacagcgggcaggatggtgaacttcatcctgaataatttccgcggtagtgcgcccggtatcgtcttcgccaggactgagcatatcggtgttattacgttgccactcatcgctgaccagcttttgcaattgttcaaaggacagacgagtaatgcgggtaaaccgacactggcgctcgccagttaataacggcagttcgcccgccagcgcgcgggcgagcgccgacttcccgctcccgttagccccaacgaatgcccagctatcgcccgcattgagcgtcagcgaatccagatgaagtgtttttgtatcgctcagacgaaacgtgccttgcgaaatttgcaacgatgacattttgcatcccattttttgcagcgatgaatgacagggatacgtctttcggcaacggatgtcaatgtgcttagcacaacgttgcaataatcactctgtccgcattaaaccaggcaatcacgtcatcgccttcctttaacgtggcggcatctgaagtcggtatcgtggcgcacagcgtctggccgtccggcagcgccatcaacacttcacactgttccgcgccgcgctcgatatggctgatcgttcccgacaactgattgtcagcggcgcgcgcaacggctgcatcccgggtaatgccaacccacggtgcttttagcaggatcagcacttctttaccttcctccaggccgagacgctcgccgctttgcgccgtcagcgcgactttaagccgcgttttgccgtcggccagcagcacatcgacatgctgttgcacctgatcgcgatcgcgggcggtaatggtgccgaaccactgatttcgggcgctggtttgcagtgaaaagcgggaaatagcggccagcagactgtcaagcggcagggcgtcatcgtcacttaacacatcgaacgctttttgctgaatttggcccagcaaatcgtaaagctggatcagacgctgaccatagcgggttaataccgcgccgccgccgcctttgccgcccgttgcgcgctcaaccagcatatgttcgctaagctggttcatgtcgtttatcgcatcccaggcgctcttatagctgattcccgcgtctttcgcgccctgactaatagagccggaaagcgcaatgtgtttcagcagagagatacgtcggggatcggcaaaaagcttttgctgaagtttcagggtaagaaggatttcggcctgcataaccagctcctggtaaaaagactattgtgactgaaaagcgcgtcagcgcaaagccgaccgcacaaaaggggagtgcttttctgtgtgatgcggttaaaatacaaaaaggactatatctggagttgcccatgttagagttattaaaaagtctggtattcgccgtcatcatggtaccggtagtgatggccatcatcctcggtctgatttacggtctgggtgaggtgttcaacattttttccggtatcggtcagaaagaccagtccagacagaaccgctgatttccccaaacgcccgctcagtcgggcgtttttgttactcaagatcctgcttttcctgccgatattttctgtgtttaatcgttaatgggtatgaataaccgctgggaaacccctgagattatcgttatattgtcgcttacataacgaaacacacaaggagttacagatggcgcattcctggttacgcctggtcgcaggggcaacattatctttcgtcatcgccggtcatgcgctggcggatgaaggcaagatcaccgtatttgccgccgcgtcgctaacgaacgcgatgcaagacattgcggcagaatataaaaaagagaaaaatgtggatgtggtctcctcattcgcctcctcttcaacgctggcgcgccagatagaagcgggcgcgccggcggacctgttcatctctgctgatcagaaatggatggattacgcagccgataaaaaagcggtggataccacgacgcgcgaaacattgcttggcaatagcctggtggtggtggcgccgaaagccagcgagcagaaaccgtttaccatcgacaacaaaacggactggattcgtctgttgaacggcgggcgtctggcagtgggcgatccgcaacacgtaccggcgggaatttatgccaaagaagcgctgcaaaagctgggcgcatggcaaacgcttgaaccgaaactggcgccgggcgaggatgtgcgcggcgcgttggcgctggtcgaacgtaacgaagcgcctttgggcattgtatatggttctgatgcggttgccagcaagggggtcaacgtggtggcgacgttcccggaagattcacataaaaaagtggaataccccatcgctatcgtggaggggcataaaaatgcgaccgtcagcgcgttctatgattacctgaaaggaccgcaggcctcggcaatctttaaacgttatggatttacgacgaagtaatgatactgaccgatccagaatggcaggctgtccttcttagcctgaaagtgtcttccctggccgtgctgtttagcctgccgtttgggatcttttttgcctggttactggtacgatgccggtttccgggcaaagccttacttgatagcgtcctgcatctgccgctggtgctgccgccggtggtggtcggctatctgctgctggtgtcgatggggcgacgcgggtttattggccagtggctgtatgactggttcggtctcacgtttgcctttagctggcgcggcgccgtgctggcggcggcggtgatgtccttcccgctgatggtgcgggccattcggctggcgctggagggggtggatatcaagcttgaacaggccgccagaacgctgggcgccgggcgctggcgcgtttttctgactatcaccttaccgcttaccctgccgggcattattgtcggtacggtgctggcgtttgcccgttcgcttggcgaatttggcgcgaccattacctttgtttctaatattccgggcgaaacccgcaccataccttccgccatgtataccttgatccagacgccgggcggggagagcgcggcggcgaggctgtgcgtgatttcgattgtattagcgctgatttcgctgttgatttctgaatggctggcgcggattagccgtgaacggacggggcgctaaccatgctggagcttaatttttcccagacgctgggaacgcactgtttaaccctcaacgaaacgctgccagccagtgggatcacggctatctttggcgtctccggcgcgggaaaaacctcgctgattaatgccatcagcggtttgactcgcccgcaaaaaggacgcatcgcgctgaatggccgggtgttgcatgacgcggaaaacggtatctgtttaacgccggaaaagcgccgcatcggttatgttttccaggatgcgcgcctgttcccccattacaaagtacgcggcaatttgcgctacggcatggcgaaaagcatgaccggtcagtttgataagctggtgtcgctgctgggaattgaagcgttgcttgatcgcctgccggggagcttgtccggcggagaaaaacagcgcgtagcgataggccgggcattgctcaccgccccggagttgctgctgttggacgaaccgttggcctcgctggatatcccgcgtaaacgcgaattactgccgtacctgcaacggctggcgcgggaaatcaatattcccatgctgtatgtcagccattctctcgatgaaattctccacctggcggataaagtcatggtgctggaggatggacaggttaaagcgtttggcccgctggaagaagtctggggaagcagcgttatgcacccgtggctgccgaaagagcaacagagcagtattctgaaagttagcgtgctggagcatcacccacattatgccatgaccgccctggcgcttggcgaccagcacctgtgggtaaataaactcaatcagccgctgcaatccacactgcgtattcgtatacaggcgtcggatgtctcgctggtactacagccgccgcagcagaccagtatccgcaacgtattgcgggcaaaagtggcgaattgttatgacgataacggacaggtggaagtccagcttgagataggcggcagaacgctgtgggcgcgaataagcccgtgggccagggatgagctgaatatcaagcctggcctgtggctttacgcgcaggtgaaaagcgtttctatcaccgcctgactatagtaggtgggtgtaaataaatttggcgatgctatcggtagtgttatcgccgatcacaacgtcagcgcgcgctttcaccgcctcatcggcgttgcccatcgcaacgccggtgcctgccgcctccagcatactgatgtcgttgtagttatcgccgaaagcgatcacatttttcattgaccctccctgcgcttctatccactgggtaaggcgcttgcctttactgttgcctttgcgcgcgatatccacctgatcgtgccatgaccattcgcactccaggccaagcgcctgttcaacatgctgaccgaaccgctgtagcctgggaatatcttcatcggtaagcgcaaacttccacacggcattcacgtcgcgcgccgcctgcgccaacgaagagacctgtgtaaaggtcggacgttgctccggcggcaaggtctgcgcccaccgggaggtacgcacgacgtgaccggttgggtgttcgtaaagcatagcgtcatcaacatacatcaggccgtgaatctgatgctcatccagtaaatcaatcaactgcaacgccttatccacgggcataggatcggcatccaggacagttttagcttgataatcatacaaataggtgccgttgcagcaaatagcaggtgtttccagcgccagcgcctgataaaaaggatgaatagcaacgtgatggcgacccgtgacaatgataagttgaaagcccgcctctttggcgcgtgatagcgcttcaagcgaggaggggagtaaggttttatgcggggttaataatgttccgtctaaatcgagggcaatcacgcgtgcagtcataattttttccagattaagagtaataattccgtctgtcggcatggtacaccgggacggtaagcagacaaaattctgcgtctgaattcagcattcgccgtcaaaagcgactacgttaagctgtgtcctgttattgcagctacatgccatatgcaaaggagtattcatgaaacaaacagtctataccgccagccctgagagtcagcaaattcacgtctggagcctgaaccacgaagggacgctgacgctggtgcaggtcgtggatgtgcccggtcaggttcagccgatggtggtcagtccggataaacgctacctctatgtcggcgtgcgcccggagtttcgtgtcctggcgtatcgtattgcgccggatgatggcgcgctgacgtttgccgccgaatccgccctgccgggtagcccgacccatatttctaccgatcatcatggtcgttttgtctttgtcggatcgtataacgccggtaatgtcagcgtgacgcgcttacaggatggcctgccggttgagttggtggatgtggtggaggggctggacggctgccactcggcaaatattacgcctgataaccgtaccctgtgggtgcctgcgctaaaacaggatcgcatttgtctgtttacgctaagcgatgacggccatctggtggcccaggagccggcggaagtaaatacagttgaaggggcaggcccgcgtcatatggtcttccacccgaatcgacaatatgcgtattgcgtcaatgaactgaacagttcggtggatgtctggcagcttaaaaatccgcatggcgagatagagtgcgtgcaaacgctggatatgatgcccgccgatttttccgatacccgctgggcggcggatattcatattacgccggatggacggcatctgtatgcctgtgaccgcaccgccagtctgattaccgtctttagtgtctccgaagatggcagcgtactgagcgttgaaggcttccagccgacggaagcccaaccgcgcggctttaatatcgacaatagcggaaaatacctgattgctgcgggtcaaaaatcacatcatatcgcggtctatgaaattacgggcactcaggggttgctgacggaaaaaggccgttatgccgtcggccaggggccaatgtgggttgtggtgaacgcgtactaaagcgctgtgtgccggatggaggcgggctggaactcatcaaggcgggatgcctgattaatttcaataaacattgcttgcagtaaaaccacgggccgccacatctgctgcggcggcccgtttataagcctgaaccggaacggtgattactgcttaggttccgccactactttactgcctacaccgcggttgttgtattcccacatgcggttgtagttagtgtcgttcagattacgctgcacctcgtctttgtcatccacggtccccgtatttccagcaaacggacgtttcgagatgaccgcgtcggcccacggtttggcaacgttgaagccctcgttaatcacgctgtcgcggatcacgacctgaccgttggtgttggcgtcgacatccagcgagcggccaagctgcgcaacgccatcgccggaggcgttaaagcggctgttgatcgccaaaaagccatagtaaatattggacagcgtcgccggggcgaagacgtaggcttcctgctgtgtgcgggagttgacgacctggaagttggtgttatcgaacaccacggcgccgcgtccggaaaccatatccacatcgccttcaatatagctgttcgtcaccagcgtacgcggctggcgatcggtttgcagacggttctgcacgccgctgttggtcacaaagaaggtgttctggcggccaaggatattgaccttgttaatctggactttgtcgccatcggtacgcaacgccaccgccggatggtttccggcatcgacgctgtcgcctagcgtgttctcgatggtcagattttgtagctgcagaccgttattctgcgaccagaacgcggcagaacacatcacaccgatcgtcgcggcgtgtttgctttggcagttatcgaacatataccaggcgggtttaccaggcatatatttcccgccgggattcaccgcgcggcgccagtcagcgacgctcatttcaccatcaatcgccatcccaattttcacatcgatcggtttttcaccggtcccgtacagggtcagacttcccggcgcggcgggaacatacacggtcccctgatagtcgcccggcataatagcaatgtactggcgtttgttcgtgcgtttaaccattgccgcatcgaccgcggcctgaatcgaggtgtgcgtaacgcctggcgtacctgccggccccaccacaaagtcaggctgtgcgggcagggtaatcggcgacggcgaccacggggcggtattcggcgtcagggaggcaaaatagcgcgccgcaacgaagtttttcgcttcatttgccgacagaattgggcgcgaggcggtgccaggcgcggtttgatcggaagggatctgatcgggtggcgtagagctacaggcgctcagcgtcacgccaaaagccagtgccagcgccagacgggaaaccgataatgtattcacaggttgctccgggcttgaaaaagttaaatgacatccattgaagcctgcttttttatactaagttgaacgaaacgggaaggcgaaaaggtaaaaagttccttttcaggccggaaacacctgtagcatcagatagttttatcacaattaagcaacaactttcgcgctttgagttgacaatccggagcagaaagaaaataaatgtctatacaactcatgacaggcaagagagcgacaggaatgcggcaacttttaccgggcgatactgtctggcgaaacatcaggctggcgacaatggacccgcagcggcaagccccgtacgggctggtggataaccaggcgctgattgtacgcgaagggcatatttgcgatatcgtgccagagacgcagcttcctgtcagtggggacaatatccatgatatgcagggacgactggtaaccccgggacttatcgattgccacacgcatctggtgtttgccggtaaccgcgccgcagagtgggagcagcggcttaacggcgcgtcataccagcatattagcgctcagggcggcggcattaacgcgacggtatcagcaacccgcgcctgtgcggaggagacgctctacctgctggcgcgcgaacgcatgatgcgccttgccagcgaaggcgttacgctgctggagattaaatccggctatggcctggagctggcgacagaagaaaagctgttgcgcgttgctgcaaaacttgccgccgaaaacgctatcgacattagccccacgctattggccgctcatgctacgccagcggagtatcgtgacgacccggacggctacatcactctggtctgcgagacgatgattccgcagctctggcaaaaagggttatttgatgcggtagacctcttttgcgagagcgtcggctttaatgtggcgcagagtgagcgcgtattgcagacggcgaaggcgttaggtattcccgttaaaggccatgttgagcagctttcgctgttgggcggcgcgcagctggtgagtcgctatcagggtttatcggcggatcatatcgaatatcttgatgaagcgggcgtcgcggcgatgcgtgacggcggtactgtcggcgtgttgttgcctggcgcgttttattttctgcgcgagacgcagcgcccgccggtggaactgctgcgccgctatcaggtgcctgtcgccgtcgccagcgatttcaatcccggcaccagcccgttttgcagtttgcatctggcgatgaatatggcctgcgtacagtttggtctgacgtcggaagaggcatgggcgggcgttacgcgccatgccgctcgtgcgctgggaagacaggcgacgcatgggcagctcagggccgactaccgggcggattttgtggtgtgggatgctgaacagccggtagaggttgtgtatgagccggggcgtaatcctttatatcagcgggtatacagaggacaaatctcatgacgcaatggtatccggcttctccggcgctctggcaggggcgcgatgacagtatagaagcgccggatgcgcggcgtctgtttcagaccgtcacgcgcagcgagaccttttcccccgaaaactggcagcaaaagatcgcgttaatgggatttgcctgcgacgagggggtaaaacgcaatgcagggcgtcccggcgcggcaggcgccccggatgcgttgcgtaaagcgctggcgaatatggccagccaccagggacatgaacggctagtggatttaggcaattgggttgcgcctacgcccgatctggaaggcgcgcagcaggccttgcgcgatgcggtaagccgctgtctgcgggccgggatgcgcacgctggtgctgggcggtgggcatgaaaccgcgtttggacacggcgcgggggtgctggacgcgtttgcgcaggaaagcgtaggtatcattaatcttgatgcgcatctggatctccgtcagaccgaccgggcaacatccgggacgccgtttcgtcaactggcgcagctatgcgacgcgcagagccgcgcgtttcattatgcctgtttcggcgtgagccgtgcggcgaatacgcaggcgttgtggcgggaagcgcagtggcggaatgttaccgtggtggaggatcttgactgccatgacgcgctggcgcagatgacgcagtttatcgacaaggtggataaaatttatctgactatcgatctcgacgtattgcctgtctgggaaatgccggccgtctccgctcccgcagcgctgggcgtgccgctgatacaggttctgcgtttaattgagccggtttgccgcagcggaaaattacaggcggcggatctggttgagtttaatccacgctttgatgaagatggcgcagcggcgcgcgtggcggcgcggcttggctggcaaatcgcgcactggtggcgttaatctgtcatccggaaaacactctccgcataaggaaggcttcacgcatgtattcatcccgctcccgttctgcacctgcgcctttttacgaaacggtgaaacaggacatctgtaaaaaaatagccggcggcgtctggcagccgcacgatcgcattccgtcggaagctgaactggtcgctcagtatggctttagccgaatgaccatcaaccgggcgctgcgtgagctgacggatgaagggtggctggtgcgtttacagggcgtggggacgtttgtcgccgaaccgaaaggccagtccgcgctgtttgaagtccgcagtatcgccgaggagattgccgcccgccgtcatcagcatcgttgtgaggtgctcacgctggagcgcgtgcgggcaaacgccatccaggccagcgctctcaacgtcaatgagagcgatgtcattttccattccatcatggtgcattatgaaaacgatctgccggtacaaattgaagatcgctgcgtgaatgcggatattgccgtggattacctgacgcaggattaccgtcagaccacgccgcacgcttatttgtcgcggatcgcgccgctaacggaaggggaacatattgtggaggcggtgcgcgccacggcgcaagagtgcgcgtggttaactatcaaagagcatgagccttgtctgctcattcgtcgtacaacctggtccgcgtcgcggattgtttctcacgcccgcttacttttccccgggtcgcgctatcggctacagggacgatttatctcctgagcgggccgctgccggaaaacgtgattgctgacacaatataacaaaattgtatcatttttgttaattctattcttgtgcttacttgtatagacaagtatatgtctgattcttatctgtgggtctgcggcggtgcctgatagtggcgttttagcgttatttggcgatggcagaccgataataatgaggagtcattgctatgcctgaaagcaagtatcgtcagcagactatccgcgcgccccgaggcacggtattaacggcgaaaagctggctgacagaagccccgctgcggatgttaatgaataatctcgatcctgacgtggcggaaaatccgcatgagctggtggtctacggcgggattggtcgcgccgcgcgcaactgggaatgctatgacgctattgttgatgcgctcacccggctggaggcggacgaaacgttgcttattcagtctggcaaaccggtcggcgtatttaaaacgcacgacaacgcgccgcgggtattaatcgccaactccaacctggttccccactgggcgacatgggaacactttaacgaactggatgcgaaagggctggcgatgtacggtcaaatgacggccggaagctggatctatatcggcagtcagggaatcgtgcagggaacatacgaaacctttgtcgaggcggggtgtcagcactataacggcacgctggcgggacgctgggtgctgaccgccggactgggcggcatgggcggcgcgcaaccgctagccgcgacgctggccggagcgtgttcgctgacgattgaatgccagcaaagccgtatcgattttcgtctgcgtactcgttacgtggatgagcaggccgccacgctggatgacgcgctggcccgcattacgcgctacacccgcgaggggaaagccgtgtccgtcgccctgtgcgcgaacgcggcggatatcctgccggaactggttaatcgcggcgtgcgcccggacctggtgaccgatcagaccagcgcccacgatccgctacatggctatttaccctccggctggcgctgggaggagtatcagaaaaacgcgcaatccgatccccacgggacgatgcaggcagcaaaacgttccatggcggcgcatgttcgggcgatgctggcgttcagtaaaatgggcgtgccgacctttgactatggcaacaatattcgtcagatggcgaaagagatgggggtggaaaacgcctttgattttccgggatttgtgccagcctatattcgtccgctgttctgtcgtggtatcgggccgtttcgctgggtggcgctgtccggcgatccgcaggatatctataaaaccgatgccaaagtcaaagagatagtggctgaggataaacatctgcatcactggctggatatggcgcgcgagcgcattcattttcaggggttaccggcgcgtatctgctgggtaggcctggagtggcggcaaaaactggggctggcgttcaacgaaatggtgcgttgcggcgaggtatccgcgcccattgtgattggccgcgatcacctggattccggctctgtcgccagccctaaccgtgaaaccgaagcgatgcgcgacggttccgacgcggtttccgactggccgctgttaaatgcgttgctgaataccgccagcggggcgacatgggtatcgctccatcatggcggcggggtgggaatggggttttcgcaacacgccggtatggtgattgtctgtgatggcactgacgaggccgccgcgcgtattcgccgcgtgttacacaacgatccggcgacgggcgtcatgcgccatgccgatgccggatatgatctcgcggtggaatgcgctgttgagcaaggtctgaatttaccgatggttgcggcgacgcaggggaaaggctgatatgaacaccatgacactcactccggggcagttaagcctctctcaactgtacgatgtctggcgtcatccggtacagcttcggctggacgccagcgccattgacggcattaacgccagcgtcgcgtgcgtcaatgatatcgttgccgaagggcgtaccgcctacggcatcaacaccggtttcggcctgctggcgcagacgcgcatcgctgatgaagacttgcaaaatctacagcgatcgttggtgctgtctcacgccgcgggcgtaggcgacccactggatgacgcgatggtgcgtctgatcatggtattgaaaatcaatagcctggcgcgcgggttttccggaattcggttgagcgtgatagaagcgctcatcgctctggtgaatgccggcgtgtatccgctgattccggcaaaaggctcggttggcgcgtcgggcgacttagcgccgctggcgcatctgtcgctgacgctgcttggcgaaggaaaagcgcgctggcagggcgaatggcttccggcgcagacggcgctaaaaaaggccggactggagcctgtcgcgctggcggccaaagaggggctggcgctgcttaatggcacccaggcatcaacggccttcgcgctgcgcggtttgtttgaggcacaggagttatttgcctccgccgttgtctgcggcgcgctgactaccgaagccgtactgggatcgcgccgtccttttgatgcgcgcattcatgccgcgcgcggacaacaggggcaaattgacgtcgcgcggttgttccggcacctgctgaccgataccagcgccattgctgaatcacatcaccactgtcataaagttcaggacccgtattcccttcgctgccagccgcaggtaatgggcgcttgtctgacccagttacgtcagacgaaagaggtactgctggctgaggccaacgcggtatccgataatccgctggtctttgccgatgcgggggaggtgatctccggcggtaacttccatgctgaaccggttgccatggcggcggataatctggcgctggcgatagcggaaatcggcgcgctatcggagcggcgcatcgcgctgatgatggataaacatatgtcgcagttaccgccgttcctggtgaaaaatggcggcgttaattccggttttatgattgcccaggtcaccgccgcggcgctcgccagcgagaataaagcgctggcgcacccgcacagcgtggatagcctgccgacctcggcgaatcaggaagatcatgtctcaatggccccggcggcagggcggcgactctgggaaatggcggcgaatacccgcggcatcattgccgtggagtggctggcggcctgtcaggggatagatttacgggaagggttaacctccagcccgttactggaacaggcgcggcagacactgcgcgagcaggtggcgcactatacgcaggatcgttttttcgcgcccgatattgagtgtgcgacggcgctgctggcgcaaggcgcgttacagcgtctggtgccggactttatgtgaatgctgccggatggcgcggcgcgtattcggcttacccaacccgttggcagggtaagacgtttacgccgccatccggcacagcgtttaactgaacatcgccgtgatcgaggcgctggcgagcgaatggaaatgcacattaaagccgaccatcgcgccgctggcgtcttcatcaacgtcaagacgctcgacgtccagcgcgtgaaccgtaaagatatagcggtgcgtttcccctttaggcggcgccgcgccgccgtagcccgctttaccgaaatcggtacgcgtctgaatgacgccgtctggtacggccaccaggcctgagccgaacccctgggtcagtacgcgcgtatccgccgggaggttcaccaccacccagtgccaccagccggagccggtcggcgcgtcgggatcgtaacaggtcacgacaaaacttttggtgcccatcggcacgtcgtcccaggccagatgcggcgaaatattatcgccatcatagcccataccgttaaaaacgtggcgatgaggaagtttatctccatcgcgcaaatcgttgctgataagtttcatgcgctctccttttgactcaccagaagtgtagccagaagcagcatcgcttaccgctgattaatggctaaaaaatgtttcattgtgtaccgcgtcattgaccgcctgggtcaaacggcgcagttgatccggacgaataatgtagggcggcatcaggtagattagcttgccgaacggcctgatccagacgccttgcccgacgaagaagcgttgaagcgccgccatattgaccgtgtgcgtggtttcaaccaccccaatcgcgcccaacacccgcacatccgccacccagggcgaactttgcgcgggggctaactcagcgcgtaactgagactcgatagacgccacctgctgacgccattcgccgctttccagcagcgtcaggctggcgcaagcgacggcgcaggccagcggattccccataaacgtcgggccatgcataaaacaccccgcctcgccgttgctaatagtctctgcaacctggcgtgtcgtgagcgttgccgagagggtcatggtgccgccggttaaggctttgccgagacacagaatatccggcgcgatcccggcgtgctcgcaggcgaacagtttgccggtacggccaaacccggtggctatttcatcggcaatcagcagaatgccttcgcgatcgcacatgttacgaatacgcctgagccattgtggatgatatatgcgcatcccgcccgcgccctgaacgataggttccagaatcacggcggctatttcatggcgatgcgcggccatcaggcgggcaaatggcgcgatgtcgctttcatcccattcgccatccatccggctttgcggcgccggcgcgaacaggttttccggcagatagcctttccacaagctgtgcatggagttatccggatcgcacaccgacatcgcgccgaacgtgtcgccatgataaccgtggcgaaacgtcagaaaacgctgacgcgattcgccgcgcgcctgccagtattgcagcgccatcttcatggccacttctaccgacaccgaaccagagtcggccagaaagacacactccagcggctcaggcgttatcgcgaccagcttacggcacagattcaccgcaggtgtatgggttatgccgccgaacatgacatgcgacatggcgtcaatttgcgctttcatcgccgcattcaattgcgggtggttataaccatgaatggccgcccaccaggaggacatcccctcaatcaggcgttcgcccgaggcgagaaccagctcgcagccttcggcccgctcaacgggatataccggcagcggcgaggtcatggaagtgtaaggatgccaaatatggcgtttatcgaaggccagatcgtccgttgtcataatcgacttgtaaaccaaattaaaaagatttaggtttacgagtctacaccatatcaaaaacaaacaacatattttggagaagcccgatggctcgccacccacgctggacactgtcgcaagtaaccgaattatttgaaaaaccactgctggaattgctgtttgaagcgcagcaaattcatcgccagcatttcgatccgcagcaggtacaggttagtacgctgctgtcgatcaaaaccggcgcctgcccggaggattgtaaatactgcccgcagagctcgcgctataaaaccgggttggaagccgagcgtttaatggaggtagagcaggtactggactccgcccgtaaagcgaaaaacgccggttcgacccgcttctgtatgggagcggcctggaagaatccgcatgaacgcgatatgccttatctggagcagattgtacagggcgtcaaagcgatggggctggaaacctgtatgacgctcggcatgttgaacgagagccaggcgcagcgtctggctaacgccgggctggattactacaaccacaacctcgatacctcgccggagttttacggcaatatcatcactacccgtacctatcaggagcgcctcgacacgctggaaaaagtccgtgaagcagggattaaagtgtgctccggcggcattgtgggtctgggcgaaacggttaccgatcgcgccggactgttgttgcagttggcgaacctgccgacgccgccggaaagcgtgccaatcaacatgctggtgaaggtgaaaggcacaccgcttgcggataacgatgacgtggatgcgtttgattttattcgtactatcgccgtggcgcgcatcatgatgccgacctcatacgtgcgtctttccgcagggcgtgaacagatgaacgagcagacccaggcgatgtgctttatggccggggcgaactcgattttctatggctgcaaattgttaactacgccaaatccggcagaggacaaggatctgcagttattccgtaagctgggactgaatccgcagcagaccagggtgctggcgggcgataacgagcagcagcaacgtctggagcagacgctgatgacgcctgacaccgatgattattacaacgcggcagccttatgagttggcaacaacgcgtcgacgatgcgctgacggcgcgtcgggcgacggatacgttgcgccgccgctatgtggtgtcgcagggcgccggacgctggctggtagcgaacgggcgacagtatcttaacttttccagcaatgattacctcggcttaagtcaacatccgcagattattcgcgcctggcaacaggcagcgacgcgttttggcgtcggcagcggcgggtcgggtcatatcagcggttattccgtggcgcaccaggcgttagaggaggaactggcgcaatggttaggatatccacgcgcgctgctgtttatctctggctttgcggcgaatcaggcggtcattaccgccttaatgaaaaaaaatgaccggattgtggccgacaggttgagtcatgcttccctgctggaagccgctaatctgagtccggcgcagcttcgccgctttatccataacgatacgcagcatctgtcgcgtttactgcaatcgccctgcgtgggtcagcaactggtggtgacagaaggtgtatacagcatggacggcgacagcgcgccgctggcggaaatccagcacattgcccgcaggcatcatgcctggctgttggttgatgatgcgcacggcatcggcgtgactggcgatgaggggcggggcacctgctggcagcggggggtgaagcctgagttgctggtggtgactttcggtaaggggtttggcgtcagcggcgcagcggtgctctgctcggaaagcgtcgcagattatctgctgcaattcgcccgtcatctggtttacagcaccagtatgccgcccgcccaggcgcaggcgttaagcgcctcgctggcggtgatccgtagcgatgaaggtcgtgaacggcgcgaaaaactcgccgctctggttcagcgctttcgggccggcgttaacgcgtcccgatttacgctactgaatgcccatagcgccatccagccgttaatcgtgggcgataacagccgtgcattgcgcctggcggaggcgctgcgtcaacaaggatgctgggcgacggcgattcgtccgccgacggtgcctgtcggtacggcgcgcctgcgcttaacgttaacgcaggcgcatgaagcgtgcgatatagaccgtctgctggaggtgctgcatggcgcaggtgaataagcaggctattgcggcggcgtttggccgggccgcatcgcaatacgaacagcacgcctctttacagcaacacagcgcggatgcgctgctgacgctgttgacaggccgccagtttgccagtgtgttggacgcaggctgcggccccggacgtatgagtcgttactggcgagagcgggggagcgaagtgaccgccctggatctttcgctgccgatgctgcaacaggctcgcgatcgtcaggcggcgcatcactatttgctggcggatatcgaagcgattccccatgacgccggcgtttttgacctggcctggagcaacctggcggtccagtggtgcggcgatttacgcgatgcgttgagcgagttgtatcgggttgtacggcccggcggcgtggtggcgtttaccaccttgtgccaggggtcgttgccggagctgcgtcaggcatggcaggccgtcgataatcgcgctcacgcgaatagctttttgccggaagaggccattgaccacgcgctacgcggctggcgggcgtctcgtcatactcaggcgatgacattgtggtttgaggatgccctgagcgcgatgcgttcgctcaaaggcattggcgccacccatcttcatgaagggcgggagacggatgtattaacccgcgcccggcttagacagattcaactggcatggccgcagcggcaggggaaatatccgctgacgtaccacctttttatgggagtgattgaacgtgactaaacgctattttgtgaccggtactgatactgaagtcggtaaaacggtcgccagttgcgccttattgcaggccgcaacgcagttaggttatcaaaccgtaggctataagcccgtcgcttccggcagcgaaatgacaaccgacgggctacgcaatagcgatgccctggccttgcagcgtaacagcagcctgccgcaaccttattccgctatcaatccttatacttttgccgagcctacttctccccacatcgctagcgccgacgaaggccgggcgatagacgcggcggtgttatcacgcggattacgaacgctggaggcgcaggcagactgggtgttgacagaaggggcgggcggctggtttacaccgctctctgccacgctgacgtttgccgactgggtacagacggagcagctgccggtgattctggttgttggcgtcaagctgggctgtattaatcacgccatgctgacggcgctggcggtagaacaggccggattaccgcttgtcggatggatagccaacgacatgcagccgccaggcgcgcgtcatggtgaatatctcgcgacgcttcgccgcgtcataccggccccgctgttaggggaaatcccgtggctgggcgtttctccatcgcaggcggcgacaggacagtatctggaccttagccccctggaacgcgcctgaccgcgcttaaaaaccgccttcttgcaggatcagacgatcctgctgttctttcgccagaccctcctgacgtcgccatgctaaaaatgtgcaaaatgtgagcgtctacgcctcaatttttgccttctcgttagccaataatctgccaaaaatagcgataatttttttttatcgcccggcgaaaacgtcaggggctgattttgccaggcggcaggggatacgggctggaagcagttatccactattcctgtggataaccttgtgtattagagttagaaaacacaacgtaagcgagaggcgacgcggcctgcgactaaattggcgcgaaagacggcttgagaaaatatcccttttcagacagcaagttatataaaatcaatggttgtaaaggaaggaggatacgttgacataaaactttcatcatccgacttgacaaatgttaaaaaagactctggtctggggataaccagcacactgctggaattttaccccgcgactgtctatgttttacctctaaatagcgtggggtatctaccgatagccattatacactggagtgttactgttttttcatccagtattttttattggcaatattcaccgtcgagagtaaaattacatccctgcccgctcactccttcaggtagccgctcatgagtaaaccgttcaaactgaattccgcttttaaaccttctggcgatcagccggacgctatacgtcgtctggaagaggggctggaggacgggctggcgcatcagacgttattgggcgtgaccggctccgggaagacattcaccattgccaacgtcattgcggacttgcagcggccaacgatggtgcttgcgcccaataaaaccctggcggcgcagctctacggcgaaatgaaagagtttttcccggaaaacgcggtggagtatttcgtctcctactatgactactatcagccggaagcgtatgtgccaagttcggatacgtttatcgaaaaagacgcttcggtaaacgaacatattgagcaaatgcggttgtcggcaacgaaagcgttgcttgagcgacgcgatgtcgtggtggtggcttccgtgtccgcgatttacggtctgggcgatccggatctctacctgaaaatgatgctgcatctgacggtgggaatgctgattgaccagcgcgcgattttgcgtcggctggcggaattgcaatacacccgtaacgatcaagcttttcagcgtggtacctttcgcgtgcgcggcgaagtgatcgacatcttcccggctgaatctgacgacatcgcgctacgcgttgagctgtttgatgaagaagtggaacgcctgtcgctgttcgacccgttaaccgggcaggtagagtcaacggtgccacgttatactatctatcccaaaacgcactacgtgacgccgcgcgagcgtattctgcaggcgatggaagagataaaagatgagctggcggacaggcgtaaggtcttgctggcgaataataagctgcttgaagagcagcgattaagccagcgcacgcagttcgatttagagatgatgaacgagctgggctactgctcaggcattgaaaactattcccgctttctgtcgggccgcgggccgggcgaaccgccgccaaccttgttcgattatctgcccgccgacggactgctggtggtggatgagtctcatgtcaccatcccgcagataggcggcatgtaccgcggcgaccgggcgcgcaaagagacgctggtcgagtatggcttccgtctgccttcggcgctggataaccgtccgctgaagtttgaggagtttgaagccttagcgccgcaaactatctatgtttccgccacgcccggcaactatgagctggaaaaatctggtgatgaggtggtggatcaggtcgtgcgaccgaccgggctgctggacccgattattgaagtgcgtccggtggcgacccaggtggacgatctgctgtccgaaattcgtcagcgtgcggccattaatgagcgtgtccttgtcactacgcttaccaaacggatggcggaagatttgaccgaatatctggaagagcacggcgagcgcgtgcgttacctgcactcagatattgataccgtggagcgcatggaaatcatccgcgatttgcgtctgggcgagtttgacgttctggtggggattaacctgctgcgcgaagggctggatatgccggaagtctcgctggtggcgattctggacgccgataaagagggcttcctgcgctccgagcgctccctgattcagaccatagggcgcgcggcgcgtaacgttaacggtaaagcgattctgtatggcgataaaatcacgccgtcgatggcgaaggcgattggcgaaaccgagcgacgtcgcgagaagcagcagaagtacaacgaagagcacggtatcactccgcaggggctgaacaaaaaagtggtcgacatcctggcgctggggcagaacattgcgaaaaccaaagcgaaggggaaaggcaagggccgttctacggcaaaagccggaattgtcgaactggatatgacgccgaaagcgttgcagcagaaaattcatgaactggaagggcaaatgatgcagcacgcgcaaaatctggagtttgaagaagccgcgcaaattcgcgaccagttgcaccagttacgcgagttgtttatcgcggcgtcctgacaatgtgtcgatcgccagcgagtcatcgttaccatggctcgcttttgagaatttcagttcaatagtaagggctaagtcagtcaggaatgaaaaacagtgacaggctttgactaacgagattgtcgaaaaactcaaaacatcaatggggtagctagtttaatcacaactgaagaaaattagcgttgaggctgaacccaacgctaattttccctctctcctcggctatgaaaaaaaacgccccgtattatcggtatagctatcctcatgatcgtcattttaatcttatgtgagttcgttgaaagcgtgtcatggcaacagattacatcattctacttaaaaaagaggtgatggaagcgcgagcatttataagtcaagcgctgcaaatactgaatgatttgtccgaaataatgacgactgtgacctcttatttaaagttgagaatatccttatctgttactttaggttacgttcagatcaggtagggaaaatatgtttaatattactaatatacaatctacggcaaggcatcaaagtattagcaatgaggcctcaacagaggtgcctttaaaagaagagatatggaataaaataagtgcctttttctcttcagaacatcaggttgaagcacaaagctgcatcgcttatctttgtcatccacctgaaaccgcctcgccagaagagatcaaaagcaagtttgaatgtttaaggatgttagctttcccggcgtatgcggataatattcagtatagtagaggaggggcagaccaatactgtattttgagtgaaaatagtcaggaaattctgtctatagtttttaatacagagggctataccgttgagggagggggaaagtcagtcacctatacccgtgtgacagaaagcgagcaggcgagtagcgcttccggctccaaagatgctgtgaattatgagttaatctggtctgagtgggtaaaagaggcgccagcgaaagaggcagcaaatcgtgaagaagccgtacaacggatgcgtgactgcctgaaaaataataagacggaacttcgtctgaaaatattaggacttaccactatacctgcctatattcctgagcagataactactctgatactcgataacaatgaactgaaaagtttgccggaaaatttacagggaaatataaagaccctgtatgccaacagtaatcagctaaccagtatccctgccacgttaccggataccatacaggaaatggagctgagcattaaccgtattactgaattgccggaacgtttgccttcagcgcttcaatcgctggatcttttccataataaaattagttgcttaccttaaaatctacctgaggaacttcggtacctgagcgtttatgataacagcataaggacactgccagcacatcttccgtcagggattacccatttgaatgtgcagagtaattcgttaaccgctttgcctgaaacattgccgccgggcctgaagactctggaggccggcgaaaatgccttaaccagtctgcccgcatcgttaccaccagaattacaggtcctggatgtaagtaaaaatcagattacggttctgcctgaaacactacctcccacgataacaacgctggatgtttcccgtaacgcattgactaatctaccggaaaacctcccggcggcattacaaataatgcaggcctctcgcaataacctggtccgtctcccggagtcgttaccccattttcgtggtgaaggacctcaacctacaagaataatcgtagaatataatcctttttcagaacgaacaatacagaatatgcagcggctaatgtcctctgtagattatcagggaccccgggtattgtttgccatgggcgacttttcaattgttcgggtaactcgaccactgcatcaagctgtccaggggtggctaaccaatctcgaggaggaagacgtcaaccaatggcgggcgtttgagacggaagtaaacgcggcagccttcagcatgtttctggatcgtcttagcgatacgcagaacacccgacacccggattttaaggaacaagtctccgcctggctgaagatagcgcactaagagaaaccgcatttattatagcgatgggtgcaacgataagctgtgaagatcgggtcacactggcataccaccaaatgcaggaagcgacgttggttcatgatgctgaaagaggcgcctttgatagccacttagcggaactgattatggcggggcgtgaaatctttcggctggagcaaatagaatcgctcgccagagaaaaggtaaaacggctgttttttattgacgaagtcgaagtatttctgggttttcagaatcagttacgagagtcgctgtcgctgacaacaatgacccaggatatgcgattttataacgtttcgggtatcactgagtctgacctggacgaggcggaaataaggataaaaattgctgaaaatagggattttcacaaatggtttgcgctgtgggggccgtggcataaagtgctggagcgtatagcgccagaagagtggcgtgaaatgatggccaaaagggctgagtgtattgaaacggatgagtatcagagccgggtcaatgctgaactggaagcgttaggaatagcaggtgatcctgacgcagagcgcatggctggaatgcggataatggaagagatcaatcagaccctctttactgagatcatggagaatatattgctgaaaaaagaggtgagctcgctcatgagcgcctactggcgatagctgaacgcagtttatcagaagagggagagagcctgtttacccttcggtgtaaacaggcttctgataagcgcagcgtcgtcggtaaacgggcttaacccaacgcctgtagcgctttttccagcgcattatgtaataactgacgatcgtggcgataggggatatcgctggcctccagcacttcctgaatcaccagccgatcgttcaccgcactgacgtcaactcgcggcccaaccactactgcgtcaatgacttttttgccaatatattgctccatcattgccagcttatcgaccagcgttaaactggcggcgggcagactcagttcgcgacccagattgccgatatacaccattggcgctggggtgcgccgcagcgcctgcgccagttcatccagcagcaggcaaggcatcaggctagtataaaaactgccagggccaatcagaatcagatccgcgtcattaatggcctgtaccgcttcccgcgtcgccggaacgttcggcgttaacatgatctcctgcggcggcgtcgctaactgatcgatattcacctcgccgtaaatctcatgcccctgttcgtcaatcgccatcagatctaccggtagctccgacatcgggatcagctgcgcgtccactttaagcagattacgaattaaattaatcgcttccagaggccgcacgctcaggtgatctaacgcctttaacatcaaatttccgaggttatgaccagaaagttcgccattaccgccaaaacgatactcaaacatagcggacgcgacgctaggttcggtaattaactgattcagacagttgcgcatatcgccccaggcgatcccgccttccgagcggcgaatacggccagttgaccccccgttatctgtggtagtcacaatgccggtcaggcgcgaacctaatgaagaaagcgaggagaggacgcgtcctaatccatgccctccgccgagggcaacgacacgatcaaggtcagccagcgtacgattgcgcataaaaattcctgaagtcaaataagcagcgctacagtagcgcaagtcgcgggttttcagcaattagccgaccggctaaaagacaattaattattcccgactacccctttatagcgagggcgttaccacggctaaatgatatatatcaatgtaaaagtgtgattttcacgtattctgtcgctaaatagcacgatcatatcgctatgtatatgtttatatagcgaaagcgtgatggcgaaattgtcatttacacgctagtatcggcgtaaccacagtaaacactctagcctctgcacctgggtcatttttgatacggtgctttggccgtgacaacgtttaacgtttgccaccagggcgcaggaagaaatgactccgcctcccgtatttggaaaggtgtacatggcttcacaacttaccgatgctttcgcgcgtaagttttactacttgcgtttgtcgattaccgatgtgtgtaactttcgttgcacctactgtctgccggatggctacaaacctggcggcgtcactaacaacggtttccttaccgtcgatgaaattcgtcgcgttacgcgcgcttttgccagtcttggcacggagaaggtgcgtcttaccggcggcgagccttcattacgccgcgattttaccgacatcattgccgccgtgggtgaaaatgatgctattcgccagatcgcggtgaccactaacggttatcgactggcgcgcgatgccgcgaactggcgcgaagcggggctgacgggcgtcaatgttagcgtggatagtctggatgcgcgtcagttccatgcgattaccggtcaggacaaattccgccaggtgatggcgggcatcgatgccgcctttgacgccggtttcgaaaaggtgaaagtcaacaccgtgctgatgcgcgacgtgaatcaccatcagttggataccttccttgcctggattcagcctcgccccattcagctacgcttcattgaacttatggagacgggcgaggggagcgatctcttccgcaaacatcatatttcgggtcaggtattacgcgacgagctgattaagcgcggttggatccaccagctccgccagcgcagcgatggcccggcgcaggttttttgtcatcccgattacgccggtgagatcggcctcattatgccgtatgaaaaagatttctgcgccacctgtaaccgcctgcgtgtttcgtccgtcggtaagctgcatttatgtctgtttggcgacggcggcgtgagtttacgcgacctgttacaggatgacgcgcagcaatacgcgcttgagaaacgtatttccgacgcgttgcgggagaaaaagcagacccatttccttcaccagagcaatactggtattacgcaaaatttatcttacattggcggttaatccttaataaggagatttcagatgagtcaggtcagcgctgaatttatcccgacccgcatcgttattcttactgtttccagccgacgcggcgaagaagacgacacctccggtcattatctgcgtgattcggcgcaggaggccgggcatgaagtggtggcgaaagccatcgttaaagagaaccgttacgcgattcgcgcccaggtttccgcctggatcgccagtgatgaggtgcaggtcgtattgataactggcgggaccggtttgaccgaaggcgatcaggcgccggaagcgctgttgccgctgttcgatcgtgaagtggaaggatttggcgaagtgtttcgcatgctctcgtttgaagagatcggcaccgcaactctgcagtcgcgcgcggtagctggcgtggcgaataacaccttgattttcgccatgccgggctccacaaaagcgtgcagaaccgcatgggagaatatcattgcgccgcagctggatgcccgtacacgcccatgtaattttcaccctcatttaaagaaataacgatgtcgcaattaacccatataaacgccgcaggcgaagcgcacatggtggacgtttccgcgaaagcggaaaccgttcgtgaagcgcgtgcggaagcattcgttaccatgcgtagtgaaacgctggcgatgattgttgatggcaaacaccacaagggcgatgttttcgccaccgcccgaattgccggtattcaggccgccaaacgcacctgggagctgatcccgctgtgccacccgctactgctaagtaaagtggagattcagcttcaggccgagccggagtataaccgcgtgcgtattgagtctctgtgccgtctgaccggtaaaaccggcgtcgaaatggaagcgttaaccgcggcgtccgtcgcggcgttaaccatctacgacatgtgcaaagcggtacaaaaagatatggtaattggtccggtgcgcctgctggcgaaaagcggcggcaaatcgggggattttaaggtggatgcgcatgattaaggtgcttttcttcgcccaggttcgcgagcttacaggaactgatgcgctggatcttccagcagatttttccaccgttgagtcgctgcgacagcatctggcgacaaagagcgatcgttgggcgctggcgctggaagacggtaagctgttggcggcggtcaaccagacgctggtaagttttgaccatccgctgacggcgggcgatgaagtggcgtttttcccgccagtcacggggggctaacatgcgtgaaacgcgaattgtagtcggccctgcgccgtttagcgtcggggaggaatattcctggctggcggcgcgcgacgaagacggcgcggtcgtcacctttaccggaaaagtgcgcaatcataacctgggcgatagcgttaaggcgctgacgctggagcattatcccggcatgactgagaaagctctggcggagatcgtcgttgaggcacgttcccgctggccgctggggcgggtcacggtgattcatcgcgttggcgaattatggccgggcgatgagattgtgtttgtcggcgtcaccagcgcgcaccgcagtagcgcgttcgacgccggtcagttcattatggattatctgaaaacccgtgcgccgttctggaagcgtgaagccacgccggaaggcgatcgctgggtcgaagcgcgcgacagcgaccagcagttggcgaaacgttggtagcagaatgtgatacgctttagggtatcatttccacacaggagttcatcatggacagatttccacgatctgattcaatagtgcaggcgcggtccggcctgcagacctatatggcgcaagtgtatggctggatgacggtcggactgttactgaccgcgtttatcgcgtggtatgcggctaatacgccagccgtcatgatgtttgtcttttccagtaagatcactttctttggcttaattattgcccagcttgcgctggtgtttgttctgtcgggactggtgcataaacttagcgccggaatggcgacgacgctgtttatgctctattcggcgctaaccggattgacgttatccagtatttttatcgtttacacctactcctctatcgccagcacgtttgtggtgacggggggaatgtttggcgccatgagcctgtacgggtacaccactaaacgcgatcttagcggtttcggcaatatgctgtttatggcgcttattggtatcgttctggcgtcgctggtcaatttctggctgaagagtgaagcgctgatgtgggcggtaacctatatcggggtggtggtgtttgtcggtctgacagcctatgacacgcagaaactgaaaaatatcggcgagcaaatagatacccgcgatagcgctaatctgcgtaaatattcgattctcggcgcgttaacgctgtacctggactttatcaacctgttcctgatgttactgcgtatttttggtaatcgccgctaattatagcgatctcttaaaatcctggccttgcgccaggatttttttaggactatatttagggcgaaacagcataaatatcttagaaatgttttcctgcgcttgccattcttatcacgtgatcatgtgaagagtgataaatgacaagtgggacctctggctgcaatacgtatacggcaaatagcatttattcccgcgacaatgttatcccttacctattggtatactgcgttgggactatggtgtaccgccggcattatatggttaacgttgtatactcattttttgataacccacgttcaacctgttgttgttttgtggatatcagcacttttgcttggtctggggtatggggccgttacctgtctttcccgctttggcactgttgtcgcaacgttgatatatattgccatcattacgcttaccggcgtgtcattagcttaccttttctcaagtggcgcgaccattttcgtgattgttggaatcatgtttagtcttaatgccttatttattttctacctgaatatcagttctggtctattcaggctgttaatcttcatggcggtaagcgggatcatcgctgcgatagttgtcaatagcctggtggccagtagcactatggtctggatagtcagtatgctgacggtattggtatggacattgattacagcactagaaaaatcgacacttcatggttatgcccgcatgttatatcacagcgagttttcatccctgtctcgttgcgctttatttggcgcgctgacgctttaccttggcattattaatgctgtggttacgctgtgtcgttatatcattttgatgattctggaaatactattatctttcaggccgtaggcgttgcaggttttttattcaggttggtgatgatgggtataatgagtaaattatgtggcaaacaattttggttagcgttttgtgaagctaaagacgtcactcgcgccattaaaaatggcggcgaggattttaataagaaatgcccgccagcgctgatttctcatttcattaccggattttcatgggaacattcattacctaatcctgcgcctgtttgcgcgtttagttttatgcttcttgtgggaggtgtgtgcagtgcgcattttgtttttgataagtttatcctgtattggccactaaatataattatttattttggcagtgctataggtatgatgctatgtgttatggctgaggtatggcttattgccaaaggttttatcctggggttgcgcctctgcgttttactgtttttattaaatattatgctctgtggtactggattatttgacgtgttgtgccatcaaaatagcgaactaaagagtgatctggttatcgcgattattatggttgtgctttgccgctgggtgatgaatggcgaaacgtttacgatgatgattcgtttctgcctggggcgtcgattagtgcgagtcgcattacaaaaatatctcacctcacagacaaggaaatgataagcccatgaacctgatgacgtggctaacaggaaaaacactggcggagctggtgaaaaaagggcagttgatcccgccagaaattaagttacctgtgtatccggccagccactacaaaaaaaactggtatgaacaaggtattcctcacggaggcgttattgggcttacggcgattatgatgaccatgacatggatcgtcagtataaacatggttattgcgcagtttgagctgcacaataaaaagcatctggagctggtcttcttcctggccgtgggctatatcgcttttcttaccccgtcaaatcagctcctgcttaaaggaagaatgagcggggtcattatttaccgctatgcgctattactggccattatttccgttacgttggcaacgttctgtaccctgtcatcagtattcatgggtgagtttaacgaagtgctcctgctgctgtttagctggtcattgctgcttttttcccgcttacagatgaatacgtcttttttctcagcatatgtttatttttaccggataaaacgcgttgtgctggaaagcgaaaacgcgtctgcttaaattcatttcgccatcgcccgctcgtttttcgcccgcagcttcttcgcccggctctccaggatcagatagcacaccagcgccagcaacaggggaataaaatagtaaagcacacggtacgcgagcagggcggcgataatcgtgccttgcgacgtatgttcgcccgccagcaacgcgaggaatacggcctccagcacgccgatgcctgccggaatatgcacgatgacgcccgcgatactgctcaccagcagtacgcccagcacaaagaaatagttcacatcctgacccatcagcagccagatgatggcgcccatcgccatccagttcgcgctggagatcgccatctgcgccagcgcgaatttccatgacggcagcaccagtttctgtcctttaatcgtcatatgccgccgcttcgcaaaggcgcaaaaccacagatagaccgcgataatcaacaataaaacgataccgagaattcgtagcgtgccttcatcgatataccagtggtcgggaagctggacaatgccgaaggtaaaaatgatgccgccaagcagaatatagcccagccagttagtggtaatgctgagtgagaaaatacgcgtgatagtactgccgggcaacccgaggcgagagtacagtcggtaacgcatcccgatcccgccgacccaggtgctgagcgtcaggttaaaggcatagcagacgaacgataccaacatcacctgtcgcttcgccagtttatggccgcaataaagccgtccaagcaggtcgtagcagccgtacagaagatagctaacgatcaccagtcctacagcgcttaaaagcgccgtgcggttatagtcgcggatgacggtccagacatcgccccagtcgacctttttagcataaaccaccagcagaacgacgaccgcaataaaaaacagccaagtcagcacttttttagccagccgccagcgcggatgcgatttagccattagggcttcactcctgtattttctggatcaacgcgatcctgggtttccatttccggctgggcaggcgggggaacctgcgccagatgcggggtatgcgcaggtagccagccgaccagcgccgggaaatgacgtaaaaagtggaacgccagcacgcttttggtcaggttccaccaggtgcgtttcggcagcatagactcatcgacctgcttacaatcattcacgatgatgccttgtaaattatcgcgcagggtctggttaaaggtacgatcgtgaatgatcaggttagcttcaaggttaagcgacaggctgagcggatcgagattactcgaccctaccgtggcccagtgatcgtccatcagcgccactttgccatgcagcggacggcgtcggtattcataaacctgcacaccgcccttcaccagatagttatagagcaaccgcgcgccgactttgactatcggcatgtctggttccccctggacaatcagttttacgctcacgccacggcgggcggctttacgcattgcgtggagcaagcgatagccggggaaaaaataggcgttagcgataatcacctcacgctttgcctgggtcagcattttcagataatgacgttcgatatcgtcgcggtgctcttcgttatctcgccagacaaacagcgcctgcgcttcgccggggtggcggttttcttcggcctgatgatggcgcttccaccagcggcgcgcggggctttgccccggcagattctcgacttcgaattgcaggatatcggccactacaggcccttcgacccgtaccgcgtagtcttgtttcgcctgcgggccgtaatccgacatatgttcggcggagtagttaatgccgccgacaaaggcaatacgatcatcaatcaccacaattttgcggtgcattcggcggaagatattggttcgcaaccccagtagacgcgggcgggggtcgtaatagcgaaaaatcacgcccgctgaggtcaattcgccgacaaacgcgtcgctgagatcgggagagccgtagccgtcgagtaatacttcggcttttacgccgcgctgtgcggcttttagcagagcggcatggagctttttacccacctcatcttcaaacaagataaaggtttccagaatgattttttgctgtgcctgagcgatagcctcaaacacggcaggatagaactggtcgccgttttccagtagctgaatttgattaccttcacgccagccgcatttcatagatggatctccgcgctaaggggggcatggtctgataaatgtcgccagttccgcagcggtagcgccgtaggagaactggcgttcgcattcttgacgtaaatacgatcgagtcgcagcagcggcatactcaccgggaatgtgcgcgccggtcggccatgggcacgggtgaatatctcctccagcccggccgcgtttaacggcgggccggccttttgccgccagtcattaaagtctccggccaccagcaccggttctgattccggcaaggcattcacccatcccgccagcatggttaactgcgcctggcggtggctctcccgcaggccgagatgtacgcacatgacgtggatagggcggttgagcatgggcggcgtaatgcggcaatagagcacgccgcgtttttcgctaccgccgaccgagacgtcgcgattttcataatgttcaatgggatagcgagaaagaaccgcgttaccgtggtggccttccggatagaccgcattgcggccataggcgaaatcgctccacatggtgtcggccaaaaattcatagtgggtagtgtccggccagttttcgatatgcagcggatgtacttcatgcgcgcccattacttcttgcagacagacgatatcggcgccgaccgttctgacggcgtcgcgtagctccggcaggatgaagcgtttattaaaggcggtaaaacctttgtgcgtattaattgtgagcactttgaatgaaaaatttcgcgtgtgttgagtcattttcttcctgtccgcgtcactatcctgattgaaatagtgtagtcgtcgtcacaaaaagatgcggtcttacggaattttccgtaaagttcggtactctgaataatgagagaaaaatgcttcaggagaaaagccatgaagtggcaacaacgcgttcgtgtcgcaaccggcctcggttgttggcagattatgttgcatttactggtagtggcgatgctggtaataggctggatgagcggcacattagtgcgcgtcggcctgggattatgcgtgctttatggcgtgacggtactgctgatgctggcgttgcagcgccatcatgagcaacgctggcgcgatgtggcggatgtgctggaagagctgactaccacctggtacttcggcaccgcgctgattgtcctctggctgctatcccgcgtattgcaaaacaatgtcttgctggcgctggcggggctggctatcctggccgggcccgccgtggtctcgctactggcgaaagataaaaagctacatcactttgcgtctaaacatcgcatacgccgctgaacccgtggtggccgctatcaccagtagcggccacaaacttccccagacaatccccagactcgcatccttaagataaatttgcttggtaatatcagtaaagtggcggataggatttatccacgtcaggttttgcagccagactggcatattttccaccggcgagacataacccgagagcaaaatcgccggcatcataaagacaaagacgccgataaacgcctgctgttgcgtggcgcaaagcgatgatatcagcaagccaaagcctaccagcgacagcccgtaaatcaccatcgtgaaataaaacagcgctaacgaaccggcgaagggaatttggtatgcccaaatgccgatagccagcacgatcgtggcctggaaggtcgcgacaatcagcgccggcaccgctttaccaacgaaaatctgccaggtggtgagcggagagaccagcagctgatccagagtgccttgttcacgctcgcgggcgacggacagcgaagtgacgatcatcacgccgatagtggtgatcatggcgatcagcgagggcaccacaaaccacttgtagtccagattcgggttataccagttgcgtaccaccagttcgctattgttgggctttggcttgccgtccatcaatgtctgctgatactccttgacgatctgttgcagataattggcggcgatttgcgcgctattggagttacgtccatcaagaatgagttgcatcggcgcaggctggaaggtatccagattccgcgagaaatccgccgggaagcgcaccagcagcagcgctttttgcgtatcaatagtcggctggatctcctgcggactgttcagcaatagcacatgggtaaacgctttcgcgcgggcaaagcgctgggtaagttctaccgaatgtttgccattatcttcgttatagatggcgatagtcgcgttagtgacttcaagcgtcgcggcgaacggaaacaggatgacctgaatcagcaccggcagaatcaggatcgcgcgcgtttgcggttcgcgtaaaagcgattgcagttctttgcgaattaacgtccataagcgatgaaacatgtccgtcctctcagtccagtttgtaggcctgataagcaaagcgcatcaggcataatgccggatggcggcgtgaacgccttatccggcctacgacgacaattatccatacacatatttaatccagtcgtcgtttggtttttagccacgtcaggccaataaacatcaccgccgaggcgattaaaaacagtacgttaacgcctaacacgaccggaatattgccggccagaaacagactttgcagggtgctgacaaaatagcgcgccggaataatataggtcaccgcgcggatcaccgcaggcatactgtctatctggaagataaatccggacagcataatcgagggcaaaaaggcggcgttcagcgccacctgcgcggcgttaaactggttgcgagtgatggtggaaatcaacagccccatccccagcgtactcagtaaaaacagactggtgatgataaacagaatcaccagcgaaccgcgatacggcacgccgagaataaacaccgataccagcatacagagcagcatcgccagcataccgagaaagtaatagggaataagcttacacagcagcagttcaacacgcgtcacttcggttgagagcagcgcctccatcgtgccgcgctcccattcgcgggcaacgaccagcgaggtgaggattgcgccaattaccgtcatgataatggtcaccgccccgggaatgataaaatgctgactgatcgccgccgggttaaaccagtagcgcgtctggacgtcgatgagcggttcaaaggtgtcgccgcgatcttccgcccgctgctgttgccagatttgccagatgccttccacataaccctgaacgaagttggcggtgtttggctcgctgccgtcggtaatcacctgaattggcgcgctgtcaccgtcgcgcgccatttgctgcgcgaaatccaccggaatcaccaccagtccgcgaatgcgtccggcctgcattttttcaattaattcatggcggttatcgctaatggtcgcgtcgatatagggtgaaccggtcatcgcatgagtgaaatccagcgcctcctggctttgttgttcaagcagaatccccacccgcagcttgctggagtcgaggttaataccgtaaccaaaaataaacagcaacagcagcgggatcaccaccgcaatcagccagctactgggatcgcgcacgatctggcgcgtctctttgacgcacaacgcacgcacgcggcgccaggagagagacttactcatgcgtatgctccttatcccagtcattgatgagagtgataaaggcctgctccatcgtcggatcggcctgttgctcatcggcggcctgcgctttgagatcgtccggcgtaccgctggcgataagcttcccgcgataaaccagtccgatgcgatcgcaatattccgcctcatccataaagtgggtcgtcaccattaccgtgacccctttttccaccatgctattaatatgcagccaaaattcacggcgggtgaggggatcaaccccggacgttggttcatcaaggaataaaatatccggttcgtgcatcagcgagcaggccagcgccagtcgctgtttaaagcccagcggcagcgcatcggtgggatgcgacgcgatgcttttcagaccaaacgcttcactcatgcgctgaattttttcattttgcgcgcggccccgcaaaccgtagacgccggagaaaaaacgcaggttctgctcaaccgtcaggttgccgtaaagcgaaaatttttgcgccatatagcccagatgctgacgggctttgccggagctgactttcaggtccatatccagcaccagcgccttgccggacgtcggcaccagcaggccgcacatcattttaaaggtggttgatttacccgcgccgttcgggccgagcaggccaaaaatctcgccgcgttgtacgacgaaattaacatggtccgtggccgcgaaatcgccaaattttttcgtcagttcctgcgcttcaatcaccgtttcgccggcagtgccttcaaccgtatgcaggattgaacccagcggagactccgaggttcccgctccgccaagcagatcgataaacgcatcttcgaagcgcggcgcggtctcattgagggtgatttccggcattccttcggcctgacgaatatctgctgcggtcgcctcttttttcaggatcaggcgtaccgaacgcccctgaatcatgccgtcgctcacctgcggcagtctgagcgctctctgtagtaacttacggttgttttcctgtggactgctcatcagaaagctacgaccggccatcgtttgcgtcagcgctttaggttcgccctgatagagcagctcgccttcattcatcagcagcacatcgcggcactgttcggcttcatccagataggaggtgctccataaaatcagcatcccgtcgcccgccagttcgtggaccatttgccacaactcgcgccgtgaaatcgggtcaacgccaacgcccggttcatccaacagcagcactttcggttcgccgaccagcgtacaggccagccccagtttttgcttcatcccgccggacaattttcctgccagacggccagtgaaagggccgagggcggtaaactccaacaaacgggcaaaggtcttttcccgtatctcgccggtaacgctgcgtaaatcggcatagagattaaggttctccatgacggtaagatcttcatacagaccgaatttctgcggcatatagcccagaaccgcgtgcagctcgctgtcgttttgtatcgggtcgaagcccaatactgacgcgttgccgccatcggctttgagcaggcccgccagcatacgcatcagcgtggtttttcctgcgccgtccggccctaccagcccggtgacataaccggaatgaatggtacagtcgagcggcgcgacggcgggtttatccattcccgcaaagcgcttcgtcagaccgtgcagcgtaataacggcctcactcatgccgtgcctcgtcattaaatttcaccgtgactggcatcccctggcgtaacgcatcgtccgcatcggtgacgataatgcgcaggcgatagacgagatcggtacgcagatccggcgtttcgacggttttcggcgtaaattccgcggtgggcgaaacgaaaccaatcttgccgtggtaaggtttgtcaggacgaccgtcggtatacaacagaatgtcgcgccccggttgcgtctgactgaggttgcgttcatcgacataggcgcgcacccagacggggcgggtcagcgagagcgttaataccgtgctgccggcgttcagcatactgccaggctcgaccgcgcgggtgagcaaggttccgttggcaggcgcgataagcgtggtgtcctgcaaatcaagctgcgcctgcgccagttgggcctttgcctgttccaggctggctttcgcctgggcgatatcctgttcacgattaccggtacggtactggctcagtttatcctgcgcggacttcagcgtcgcctgcgcctgatcgcgcgatgagcgggcgttttccagatcgttagcggaaatggtgcggcttttccacaaaccttgctgacggttataaaagttttgcgcgtagtcataggcggcttgcgcctgtctgacggcggcggcggcctgggctatctcttcatcgcgatagcctgccagcatcaaatcatattgcgcctgcgcgaccgacacgccagctttcgcctgcattagcgcgttttcgtatggcgcgtgatccagttcgccgagcacctgtccggctttgatagtatcgccttcatcaacattcagcgacgccagcctgccgccgacgcgaaagctgatattgacggtacggatatcgacattaccgtatagcgtcagcccatcgtcctgccgactttgataccaccaggttccaccggcaatcacagcgacgatcgctgcgattgccagtccgataacgacaggttttttcatcagtccagactcctttgcgttaaaccgtgcagaataagatcgatgtggcaggttaccgtctggtaaatcagctccgctttttcttcatcaaactgcggccagccggtacgtaacagaatagtttctttgccgagacgaaacgccagtacttctcccagtaaggcatgggtatgcaaaatcatgcgcgtatcattggcgtcgcagccggtataagcggcaaccaatcttgtcagatgggtgtgcaacggatcgataacctgttcatggaccaattgataggccgacgtgggagagagctgctcgcgtgaaataaatttgctcaggttaacggtgtcttcctgcgtcagcagcataatcatgttcttgcaggcgagcagaatgagctcgcgtatggcgtcccggtcaggggcaggctggctaaacagacgctccgctttttcagcatgggggcgaaatttttcgccaagaaaatcggcaatccactgggcgcaggcgaggtataaatcctcttttgagccgaaatagtaagtaatggcggcaatattttgccccgccagcgcagcgatatcgcgcgtggtagcatggaggccatactcgccaaactgcgccagcgcggcggcaatgagctgacttttcgcctgctcgcccttggtggtcgtagtgggaatattcatcacacgccctaagtcttaatcaatcgattgattaagactatgactcataatggtacttgtccagtgtggtcgattaatttgtctttgctaccttccgggataatttatgcgccgcatcacaaaaactgctacactccgccccttcatgacattgtggtttttgtcattccaaatttgagcatctccctgaaaactacaccggcaacggtcggggcggtccggagtagttatgtcttttgattccctgggattaaaccctgatatcctgcgcgccattgccgagcagggttaccgtgaacctacccctattcagcaacaggcgattcccgccgtgctggaaggccgcgatctgatggccagcgcccagaccggaaccggtaaaacggcgggttttaccctgccattattgcagcatctgattacccatcagccgcacgctaaaggtcgtcgcccggtgcgcgcgttgatcctcacgccaacccgcgagctggcggcgcaaattggcgaaaacgtcagagattacagtaaatatctcaacattcgctcgctggtggtatttggcggcgtaagcatcaatccgcagatgatgaaactgcgcggcggcgtggatgtgctggtggcgacgccgggacgtctgctcgacctggaacatcaaaatgccgtgaagctggatcagattgagattctggtactggatgaagccgaccgtatgctggatatgggcttcattcacgacattcgtcgcgtgctggcgaaactgccggcgaagcgtcagaatctgctgttctccgccacgttctctgacgacatcaaagcgctcgccgaaaagctgttgcgcaacccgctggaaatcgaagtggcgcgccgcaacacggcctcagagcaggtaacgcagcacgtgcactttgtcgataaaaaacgcaaacgtgaactgttgtcgcagatgattggccagggcaactggcagcaggtgttggtcttcacccgcaccaagcatggcgcgaaccatctggcggaacagcttaataaagacggtattcgcagcgcggcgatccacggtaataaatcgcagggcgcacgtacccgcgcgctggccgattttaaatccggcgatattcgcgtgctggtggcgacggatattgcggcgcgtggtctggatattgaagaactgccgcacgtggtcaactatgaactgccgaacgtaccggaagattatgtacaccgtattggccgtaccggtcgcgcggcggcaactggcgaggcgctgtcgctggtctgtgttgacgagcataaattgttgcgtgatatcgaaaagttgctgaaaaaagagatcccacgcattacgacgccgggctatgagccggacccgtcgattaaagcggagccgattcagaacggtcgtcagcagcgcggcggcggcggtcgtggacgcggacaaaatcaggggggagcggggcgcagtcagcagccgcgacgccaggatagcggggcggcgaaggcgaaaccaaaaccgcgcacaggcgaggggaaacccgcgggcgacaaagcacgtccgccgcgtcgcccgcgcagaatcacgcctgcccagtaaattttatccggcaacatgcccggtagtgcgacgcttaccgggcctacggactatgcaaatacgtaggccgggtaaggtgcttgcaccgtcatccggcaaaatacacatcgcgttgcgagccgccttccagaaccggcaaaaaaggtacttcccgcccctgaaatgtgccacaatagtggctgtttatacagtacttcaggttttctcatggcattgaccgctgcgctgaaagcgcaaatcgccgcctggtataaggcgcttcaggaccagattcccgactttattccccgtgcgccgcagcggcagatgattgctgacgtcgccagaacgctggccggggaagaagggagacatctggctattgaagcgccgaccggcgtcgggaaaaccctctcctatcttattcccggtatcgccattgcccgggaagagcaaaaaacactggtggtcagtaccgctaacgtggcgttacaggatcagatctttagcaaagatttgccgctgctacgaaaaatcatccccgatctgcgctttaccgccgcctttggccgcgggcgttacgtgtgtccgcgaaacctggcggcgctcgccagtagcgagcctacgcagcaggatctgctcgcctttcttgatgacgaactgacgcctaacaaccaggaagagcaaaagcgctgcgccaggctgaaaggggatcttgacggttacaaatgggatggtctgcgggatcataccgacattgctattgacgacgatctgtggcggcgattaagtaccgataaagccagttgtctgaaccgcaactgtcactattaccgcgagtgtccattctttgtcgcccgacgtgaaatacaggaagcggaagtcgtggtggcgaatcacgcgctggtaatggcggcgatggaaagtgaagccgtactgccggaaccaaagcatctgctgttggtactggatgaaggtcatcatctgcccgatgtcgctcgcgatgcgctggagatgagcgcggaaattaccgcctcctggtatcgcttgcaactggatctgttcagcaaactggtggcgacctgcatggagcagtttcgccctaaaaccacgccgccgttagcgaaccctgagcgacttaacgcccattgcgaggaggtgtacgaactgatcgcctcgctcaatgccattcttaatctgtatatgcccgcagcgcaggaggcggagcaccgttttgcaatgggcgagttgcctgatgaggtcatggaaatctgccagcgactggcgaagctgaccgagacgctgcgtgggctggcggagtcctttctcaacgatctcagcgaaaaaaccgggtcgcacgatattgtgcgtttgcatcgggtgattttacagatgaaccgggcgctgggaatgttcgaggcgcaaagtaaattatggcggctggcttcgatggcgcagtcttcaggcgcgccggtgtccaaatgggcgacgcgtgaaatacgcgaagggcaactccacgtctggttccattgtgtcggtatccgcgtcagcgagcagctggaaagattgttatggcgcagcgtaccgcacattattgtcacctcggcgacactgcgctcgctcaatagcttttcgcgcctgcaggaaatgagcggcttaaaagaaaaagccggcgaccgctttgtggcgctggattcgccgtttaatcatgtggaacaggggaaactggtgattcctcaaatgcgctacgaacccaccattgataacgaagagcagcatattgccgaaatggcggcctattttcgtgagcaactggagagcaaaaaacatcatggtatgctggtactgttcgccagcgggcgggcgatgcagcgttttctggagcatgtcgctgatgtgcgcttactcctcctggtccagggcgaccagccgcgttaccggctggtggagctacaccgtaaacgggtggagagcggcgaacgcagcgtgctggttgggcttcagtcttttgccgaagggctggatcttaaaggcgagctgctgacgcaggtccatatccataaaattgccttcccgccgatcgacagcccggtcgtgatcaccgaaggcgaatggctaaaaagcctgaatcgttatccgtttgaggtacaaagtttaccaagcgcgtcttttaatttaattcagcaggtagggcgattgatccgtagccatgcctgtcggggagaagtggtcatttatgataagcgtttgttgaccaaaaactacggacagcgtttactgaatgccttacctgtttttccgatagagcagcctgccgtgccagacgttatagtaaaaccaaaagcaaaacctgcacgccgccgacggcgttaatgctgtgagcacacttcaaggagctttcaatggattatcgcaagatcatcaaagagatcgggcgaggtaaaaatcacgcccgcgatctggatctggataccgcgcgcggtttgtatacccgaatgctgaatggcgacatccccgacctggaaatgggcagtatattgatggcgctgcgtattaaaggcgaaggcgaagccgaaatgctgggcttttatgaggccatgcagaatcataccatcaaactgacaccgcccgcagataggccgttgccggtcgttattcccagctataacggcgcgcgtaaacaggcgaatttaacgccgctgctggctatcctgctgcataaattgggcttcccagtcgtagtacacggcgtcagtgaagatccgacccgcgtactgacggaaactatatttgagctgatggggattatccccaccctacacggtggacaagcgcaggccaaactggacgggcgccagccggtgtttatcccggtgagcgcgctctgcccgccgctggaaaaacagctggcgatgcgctggcggatgggcgtgcgtaacagcgcgcattcactggccaagctggcgacgccatttgctgaggatgccgcgctgcgtttatcaagcgtttctcatcctgaatatgttccgcgtgtggcgaccttttttagccgcattggcgggcgggctttgctgatgcatggtaccgaaggcgaagtctatgccaacccgcaacgctgtccgcaaatcagcctgattgatagccgcggcgtgcaggtactgcatgagcgtcagagcgacacgcacgacgagccgctttcactgcctgcgactaaagatcctgaaatcaccgcgcgctggattgagcgctgccttgccggccatgagccggtgccgcaatcattaaaaacgcaaatggcctgttgtctggttgcgacgagagaggcggcgacgttagaagacgggcttgcgcgcgtcgaacaggcttttagcgaataaaaaaagcccgtccagtgacggacgggcaaataagggtaacaaacagggttaatgagggttggagcagtgggtctgttggcaaacagacgagggtaatacccgtcagaattcaaacaacagcgatgttacagcctgaaatctggcgggcaggtaaattatttataaatcaccgcagtgccgctcattttgtcattacccacggcggaggtgatgttataagcgcttgcgccagcagcggcggctttttcagccagtttagcttccaggccatccagcgtggtggcgccatcggcagacactacgccgattttatgcaggttttgcgtctgagacgcgctaaccggttctgcggcaaaagcgccaaaagaaagggtggaaagcgcgatggctgcaacagcatatttaatggttttcatgattaatctctcgcaggttattctgtttatgggacgatgttccgtcgatgtgatgagtatcacggttttttgcgaaagataaaatcgaatagaattgacggccttgctcaaaatttttgaatgacaaataacctattgattattaattaattcaacggtggaatttaccgttcttgtcatctggctttacagagtcgaggttaacggcacattctgcgacgcagaacgctaaaaagcatgagcgtaaaggaatggatgatactggcggtttcggtaaagaaaagtcagcgtaactggctgtcttttgaacctctgcgattatatcctgaaaatgttgcgttatgtaaatctttctcctgctggcaggatatgcataaccgaacgcccggtacggctttacgccgcgcttcagggatagggtcgccgcacgattcgcattcatcgcgactttcgccgtggggaagttcgccgcgagcgcgggcaacggcatcttcaatggtattgttgatttgttcattcactgcgtcgtcatttgcccagccggatgccatcacgctctcctgattttagggtacctgaggttaagtgtagcgccgtcaggtgaaaaaatcgcatcgcgcgatcttttcagaccatgagcagaaccaatgtcattcagatatccgatcaaacgagcgaggcagggaattcgcggtggtatatttaccccgtggcgttatacgggtatcttacgccgctgctaaaaggagaatgccatgtccgcccagaaaccggggttacacccgcgcaaccgccaccaacaccgttatgatctcgccgcactgtgtcagaccacgccggaattgacgtcctttcttatccgcacgcccgccggtgaacagagcgttgattttgctaatccgcaagcggtaaaagcgctcaataaggcgttgctggcgcatttttatgccgttacacactgggacattccgccagggtttttatgtccgccggtgcctggtcgtgcggattatatccatcatctggcggatctgcttggcgaaacgacagggagtattccggcgcaggcaactattctggacgtgggggtgggcgccaattgtatttatccgcttatcggcgtacatgaatatggctggcgatttaccggtagtgaagtcagcgacgcagcgatgtccagcgcgcaggctatcattcaggctaatacggggttaagccgcgccattcgtctgcgtcggcaaaaagatccggcggccatttttaccggtattattcataaaaatgaattttatgacgcaacgctttgtaacccgccttttcacgactccgccgccgcagcccgcgcgggcagcgagcgtaagcgccgcaatttggggcagaataaagatgatgcgctgaactttggcggtcaacagcaggagctatggtgtgaaggcggcgaagtcgcctttattaaaaaaatgattgctgaaagccaatccttccgccgtcaggtgttgtggtttacgacgttggtgtcgcgcggcgagaatttaccaccgctttaccgggcgttgacggaggctggcgcggtgaaagtggtgaaaaaagagatggcccaggggcaaaagcaaagccgctttatcgcctggacctttatggatgacgaccagcgtcgccgttttatcacccgtaaacgctaaatcgtcggttcgcgcggcggcagtgaatcaggcggcgggccgccggcgggggcgggcagaacctgatacgtttgcaccggcgcgcgcacattagccagatcaaaatgctttttcacctggctatcaagggcaaaacgcaccgtccactgcttgagcggtagggtggtgaacgatacgcgtaaagtaaacgccgtgttcgttaaaccgacaataccggcgaacgtgggttcgccgataatcagcccgcgaatatcctccgtctccatcagcgccgttaccgcgtctttcagcgcctgattcgctttatccgcatcctcatggcgatccacgtcatagttggcgacaactgagccgataccgcgcacaaagttggcgaaagtggtgatcgaggaccacgggataatatggtatgccccggtatcctgccgcacgccgacggaacgaatcgacattctttcgaccgtccccgtcagcgggcctatggtgactaagtcgccggtattcatcccgttttcaaactgaataaagacgccggtaataatatctttcaccaaggtttgcgaaccgaaagagatagccagacctaacgcccccgcgccagccagcaatggcgcgatattgacgccgatttccgataacacgatcatgatggttatggtactgataatcactgccagcgcattgcggaacagcgtcagcagcgtgcgcgtgcgggcgctgggtagcgggcggccatgaatatcggaggccagacgattctcaatcagactggcgaggatcgtccatcccacggcggagaagaataagattaacgcgatacggataaggatatcgaccatcttttcccccgcgccataatgtagccagtgccagaaatcgaatagcccccaggcgttgagcaacagcataacggcgacgcagacggtcaaaaagcgtgcgacttttagcgctgaggagagccagccgttaagccgcttttgtaattccgggtagttgcgctgcgtatggggcgacagggtgatggttttcgctatccagcgggtaaacataccggagataaacgcggcgatgccaataatcgccagactgcgcacggtcgcgcccatcataaacttcaggctattgcctgggtcgaataacgagaagaaaaacagcacgataaagtaagcgctggccagccagtgccacaccagcgcaaaggcgcggataaacaggctaaaaaaggctaatgatcgttccgccagacttaataaatgttgcgtaatctccgctttgtttttaaagatcaggtacagcgcccagatggtgatgcagagcatgatcgccacattagccatcgcgccaacctgaacattcacctggttggaaataatcggaacggcaacaatcagcccgtagccaatcaagctgctaagggaactcatacggcgattccagtaacgcgctgtcgcatcctgaatcgcgaatgggcgtaactccggtacattagggcaaaaaataagccgcagaatcgctttaaagaactctattagcgcgaaggcattcaggaacaggctttgctgaaaagcgatagttcgacttcccgcatggaaattatcactgagcatctgaccgataaataaggtgagcgccagtagcaggaggtcgataataaacgcgccgacgatcatcgccgggagctgtaaccagttgctgcgttcacggtttttcttgcgtgcccacaggcccatttttcgatataacggcagggcgcaaagccgtatcacgctataaaaaccaaataccgcgacggccagaaataaaaagtgggttaacgcgttggtgaaggtttgcgagttaaacggcttgtgcggcgcatcggtgatgttgcgataaagctgggcgaaacgggtagcgaaagcatcgccgtactgacgggtaacggtggtgacgttctccagtaccgttttctcatctttggccgcaggcggcgcaagcgctggcgctggctcggtcggcggcgtggttgaggcttcgcggagttgcgctatcaattcgttacgtgaagcctcgttctccagtacgtcagccagggccgcataggccgcttttttttgttcaggactgggctctggcgctgcttgctggctggttgatgtccccgtggtcacgccgggtatggcgaccgcatgggcaggtgcgcccagtagacaaaaaaggatgaacagggtccaccgcatgactcctccagtgagaaaagagacgcaaaacactaagtatagatggcgcaggggagggaaaatgaaatgggactattccatgatgcccttcctgccgcagggctggaagggcgatatctcaggagacgtgctgtaaaaattcctgtaaacgtgggcttggcgggttttcgatcaacgcctgcggactgccatcttcggcaatacggcctttatcgatgaaaatcagccgtgaggcgactttttcggcaaagccgatttcgtgagtgacaatgaccatggtcatgccttcttccgccagatcctgcatgactttcagcacttcatggcgcagttcagggtccagagcggaggttggctcgtcaaagagcatcattttcggcttcactgccagcgctcgggcaatggcgacgcgctgttgttgaccgccggaaagctcggaggggtagtgatgcgcccgttccgccagtccaactttcgctaacagagctttcgcctgtttttccgcttcttctttctttacgccgcgcacgcgcagaggaccgaacattacgttttcgagcgcggtcagatgcgggaacagataaaactgttgaaacaccatgccggcttcctggcgaatcagccgttcgtctactttaggatcgttgactttcagaccatcgacaatcagatcaccggaggtgatctcttccagtttattgatacagcgtaataacgtggatttacccgaaccggaagggccgataatcacaaccacttcgccctgacggatgtttaaatcaatgttatgtagcacctgggtggggccaaagtgcttggagacgtttttaaattcaatcacaggattttcatccttctttcaagacgacgcaaaataaagctcagcaccagcgtaatgatcaaatagaagacggccacggcgctccagatttccagggcgcgaaagttaccggcaataatttcctggccctgacgggtcagctcggctacgccgataacaataaacaacgaggtgtctttgatgctaatgatccactgattgcccagcggcggcagcatacggcgcagagcaagcggtaaaataacatggcggatggtttcccggcgagaaaggcccagcgccagacccgcttcgcgaaaacctttgtgaatggatagtactgcgccacgagtaatttccgcgatataagcgccggagttaatcataattgtcacgaccgctgcgctgaacggatcaatacgcaaatcattaaatgccatcggcagggcaaagtagataaacatgacctggacaacgatgggcgtgccgcgaataatttcaatgaaaaccagggcgatgtggttggcgaaccagccgccaaacgtacgggcaaaacctgccgccagtccaataaccaggccgccagccagaccgaggaccgagatccacagggtcattttagcgccctcaagcaaaagcggaatggcgggccagatggcgctccagtcaaactgcatatgtcgttcctgttaccgtggtgtaaatagtcaaatgctctatccggcgcggaaatggcggaaagtgtcttatccgtcacggaaagagctgtaggcccggtgagcgtcctcactaccgggccacaagccaacatcaggtcgttttatttaggttctgtaccgaaccattttttgtagatttcgttataggtgccattctcacgcagcgttttcagcgcgccgttgactttctcgcgcagttcatcgctgcctttcgggaaggcaactccgtattgctgtgcttccagcgattcgcctaccgccttgaactggccgttgcctgcggttttgataaagtacaggatgttcggcgtatcgtgcagaacggcgtctgcgcggttggtgcctaattccatgtacgcgttatcaatgttcgggaactgacgcaggtctttggttttgatattcgctttcgcgtaatccaccgacccggttccgctcttcacggcaacgactttgccatcgaggtctttaacgcttttaatatcgttattgttggctttcaccatcacgagcagaccgcttttgtaatagccatcggaaaagtcgatcgcttttttacgctcgtccgtaatcgtaatacccgccagcgccagatcgatatttttggtttgtaatgccggaataatgccgctgaaatccatcggtttcagggtgtagtccagcttcagttctttcgcgatagcgtcccacagatcaacatcaaaaccgacgtatttgtcgccctgtttaaattcaaacggaacgaacgccgtatcggttgccacaacgagtttcttatccgcggcgtgcgaagacaccgcaaaagccagggtaagtgcagccagtgaaacttttaatagagacttcatagcatttccttttctatccacggggcgatcccctgcgagaacatgtagcgtaatgaaaaaatcatgccaattatgtaactcattgttttaacagaagcgtgaaacattcctgtgcacaataagtcgggcaaaaccagtacgccgcaccgttttggggcactgatttagtgcatgaataacaaagtagagatacagggtctatttagcgtaaaaatcgttgttaaaacaatctttaattaacgattgtgtgatgtaattattacaaataattcacttttgtcggaggggagtacaagacgtgtgcactatttaagtgcaaaacccctgtgccaggcaggggtatagggatgacttatatacctgtgtacatcaagttgcaggtgcgttcgcttcagtgaccgacggaagtcaggcttctgcggattcgctgcgtttgtaccttcctgcaactcgaagtattcagggtagagatagatttattcgatgttggattcgataaaccacaggaatttatcgaggtcgcgtgatgcggcggtaaagatatcggcagtgtcttcatctttggcttcaccaatagctttgcgaacatcattagcgacaacagcgtagcgatcggccagttcttttaagtgatcctgcacgttatggatgtcgagcggatagcttttcagtggagttttgctgttgataacttgcgtggtgcctaacgccacaccgccaagctgtacggcacgctcggccatagtatccagatgatcggtcagtgcggtacggaagccatccagcatctcatgaacggcaataaagttagcaccgcgcatgttccagtgggcctgtttcgtgatcagcgacaggtcaatgaactggatcacctgacgattaagcaactcaaccgtcgcttttttatcgctctctgatacatcgttacgggtataaagcagattagacgcttttgtttttaccagtttagcggtactcataatctcatatcctcttgatgtttgtgtcccaggtaattaacgaaaataagtatagcaccggtttttaactttgcttttttgaatttacctatcactttaatagtacagacaagatttaatatttattatgattaaaaatcaattagttagatgagtttgctgtttggtgggtaataattctcattttaatgtaaaaaatgagaaaaaatatgacaaaaaatgacgaagtaatagcgcaataataaaaggtgaataacgaggtgatattctgcatgattatgcacatcatgcagaataagaaactattttacgtcaacttgtttaatttgcggttcgcgtcgaatcgttagggtagaacccattgaggcggcaatgatggcgcacagggccaggatttgtatgcccgtaagcgtttcgcccagaaaaatcatcccggaaacggcggccagcgcgggttccatgctcatcagcgtaccgaaggtgcgggttggcaggcgcgtcagtgcaatcatttccagtgaataaggcagcgccgtagaaagcacagcgaccgctaaccctaagggaagaatcgaccagtgccatagcgcgtcgccagcctgaactgcgccaatcggcacgaaaatgatggcggcaatcagcgagcctaccgccaccgtggccggaccatgttccgcgcctgctcgctggccggtaagaatatagacagcccaacaggcgccagcgccgagcgccaacgcggccccggtaagatcgacgtgagacatatcttgccctaatggcagcaggaaccagagcccaagcacagccagtacgacccaaataaaatctaccggccgccgggatgaaaacagcgcgaccgccagaggaccggtaaattccagcgcgaccgcaatacccaacggcaccgtctgaatcgacagatagaatagatagttcatcccgcccagcgacagaccataaaacagtaaaggcagccgctgctctttggcaaaacgcaaacgccagggtttgaaaaaggcgataaggataagcgttcccaacgccagacgaagcgccgttacgcccggcgcgccgacaagaggaaataacgattttgccagtgaagcgccactctgaatagaggacatggcaatgagcaaaaccaaaatgggcaaccagactggtagtttacgtgttgaccccggcatcctttctcctgtcaaaaaatgtcagtacgagtaaaggtggcagtgtaatggaaattccccggagcggttgaggattcgttgaaaaaaatttccaggattccataaaatgaacttaaattgatggataaatagactgttagtttaggaataatctggatgaatgtatcgcgccacacgcgcattattggtgcaatcagccggaaaagtgatgttaattgaataagatagcgcgatatggaaacgttctgttacatgaaaggcgcccttagacaccgtgaatcgcaaagagtttcccattaatttttgatatatttaaaacttaggacttacttgaagcacatttgaggtggttatgaaaaaaattgcatgtctttcagcactggccgctgttctggctttttccgcaggtactgcagtagctgctacttctaccgttaccggtggttacgctcagagcgacgcgcagggcgtagcgaataaaatgagcggtttcaacctgaagtatcgttacgagcaggacgacaacccgctgggcgtaatcggttccttcacctacaccgaaaaagatcgtactaacggtgcgggcgattacaacaaaggtcagtactacggcatcactgccggcccggcttaccgtctgaacgattgggcgagcatctacggtgtagtcggtgtgggttacggtaaattccagacgaccgattacccaacctacaaacatgacaccagcgattatggcttctcctatggcgctggtctgcaattcaacccgatggaaaatgttgctctggacttctcttacgagcagagccgtattcgtagcgttgacgttggcacctggattgctggcgtaggttaccgcttctaatcacgtcggtgaaaatgaaaaatccgcctttcggggcggattttttttgcctgaaacgtgcattattttagtgaaaaaatatcgctgcccagatggttatagtccactttctgtaatttgaaattggtgatataaacgggcccggctttctgttccgaaataaatcgatagcgatttttgatctctttagcgctaattcctgtccattgcgagaaaaaactcaggaaatcgttcgcggaacggcgagctttaatgatccgatgcgctttactgtcgctggatagcaccataaacggcacctggaagttttgctggaatttgtcgtcatgcgccaggtactgtaccgctttgccgcgttctttaaacgccagcccgtgatcggagaaatagacgagcgaaaaactgtcgccgctatgacgaagctgagtatagagctgacggagcaaattgtcggtttgcgtcatggtgtataaataacaagacgtctctttcgactggacaaacgtcgcgtattttccctgagtacggtcgcaggcctggggatgcgatcccattaaatgcaacacaatcaactgcggttgcgtgcgttctgtcgccaatacctgcgccgtcatggttaacagcgcgtcgtcgcgagtatttttatccgcttcaaaatcgccgtttttcaggaaatgcgcttcatcggcgcgtttggcgatactggcgatggccgtgtcgtattcgccgatttgcccctgattggaaaaccaccatgtctgaaaaccggcgcggttagccagcgtgacgaaattatcctgatactgcggtttgttaaccaccacgcgattgagcgttaaaccgagcgatttttgcgttgagccgctggcggcgatgtaatccataaagaagtcgccattcacatggctggcgaagggggtattatcccagtggccgccgaaagcgcccatggcatcccgtcgcgcgctttcaccaatcaccacgacatagatgtgatatctgggtttcaccgcagtaaccgtccagctatcttttatgccggatagctgcgccatacggtgctgctcttcaatgacttcgttgttattgacgataacgtctttggcgaagcgaaaaaccggatagccggtatcaataaccttaaaaacgccgccccaggccagattttgtatcggcgcgacgaaaaatgccgcgacgctgatcagcaggcacaggctgtcgaggctattccagcgcggcctgacctcttcttttcggcggcgaagcgcaataatacccagcgcaaaaataaaaagtccggtcaggtagctataccacgggaagatggtcaggatttcgctcgactcttccatattggtggagtgcagcgccagcagcgtattaaagttcggcgcgccgtaagcctggccaaagggaaaatagcaagcggctaccagcgaacagatgccgagcagcgctttttgtccgcggggcaggtagcgccagagcaacagcaacaggcaggtaaacgccgcggtataaagcaggctaaaggggtagccgagcgcgaggttaatcagcagcgactgtaaaaagtagaggcccgcccacgggcttacagcccgacgacgggccagaagtgaatcgataagggttgaattcatatgccactattgcaaaaacgccatgtgctaaccctggcgcgaagggtcattacctgcctgattatgcgtaaaaaaggtattgggttcgcaacggcgagtcgcaaaatattcagggctgccagaagatagagcgtgcgggtaagaaggtcaaccgccggaaagaaaatgttttgcgaagagaatagcaaaaccacaaaaaaacaggggaaatgggcgccatttccgttgaggatgcaaaataaagcggcgtaccgcaccgccgcgttatttcgtggaagggttatcctgctccggtttgccgttgagcatatcgcacaacatagagagcagcattaaccggactttaaagggagagtgactgaacacgcgtatacacctcttaaattcgttcatataaacctcctgatgtttctatcccatcgatccgtgagggatgtctgcattacatacagatatagcacaggctatgttttatagctattgctaaaacgttaattttttgtgcccggacaactctggtttacaatgagcgctctgtcagctgacgcgttaacgcgtcacagaaacgaggaagcaaaatgggtcgtcgcgcaggtacgccaacaacaaaaaaagtgacgcaattggtgaacgtagaagaacacgttgaaggatttcgtcaggtcagagaggcgcatcgccgtgagttgatagacgattacgttgagctgatttccgatttaattattgaggtaggggaagcgcgtcaggtggatatggcggctcggctcggcgtctcccagccaactgtggccaaaatgcttaagcgcctggcatcgttaggatttattcaaatgatcccctggcgcggcgtttttctgacgccggaaggggagaagctggcgcaggaaagccgcgagcggcaccaaattgtcgaaaattttttactggtgttaggcgtaagtccggagatcgcgcgtcgtgatgcggaagggatggaacaccatgtcagccaggagacattggatgcctttttggccttcacgcaacagcatggaacatctgcagaatgaatctggcctttttacgggcgctgcggcgtgaccgtttttttcagttgttgatcattgtggggatggcgttaagcctgtttgttccttttgcgccccgcgcctggcctggcgcgattgactggcacaccattattaccctcagtgggttaatgttgctcactaaaggcgttgagctgagcggctattttgatgtgctgggacgcaagatgacgcgccgatttcataccgagcggcaactggcgatgttcctggtgctggctgcggcggcgctgtcgacctttctgacaaacgatgtcgcgctgtttatcgttgtgccgctgacgataacgttaaaaaaactgtgcgcgattccggtcaaccgattgattatttttgaagcgttggcggtgaacgccggttcgctgctgacgcctgtcggtaatccgcaaaatattctgttgtggggacgctccggcttaacctttgctgaatttagcgggcaaatggcgccgcttgccgtcatgatgatgctgacgttactgctcctgtgctggttttgttttccgggtagggcgttacagtatcataccggtacgcgttcgccgcagtggcagccccgtctggtgtggagttgcctggcattatatgtcgtttttcttaccgcgctggagctcaggcaagagttatggggactggtgttggtggcggctgggtttattgtgctggcgcgcagggtgatagtcagcgtggactggacgctgctgctggtatttatggcgatgtttattgatgtccatctgctaacgcaattgccggcgttgcagggcgttttcaaccaggttggcgcactgtctcacctggggctttggctaaccgctatcggcctgtcgcaggttatcagtaatgtgcccagtaccattctcctgctgaactatgtaccggcctcgacgttgctggcgtgggcggtgaatatcggcgggtttggtctgctgccggggtcgctggcaaatcttattgctttacggatggcgaacgatcgccgaatctggtggcgatttcatttctattcgctgccgatgctggcatgggcggcgctggtgggatatggattattgcaactgatgccgtaagagaagcccgatagtgtctatcgggcttcgcaggcagagtctgtcagttcagacgaaccggcatcccggaacgatcctgaactgcctgttgtacgacggtctgatcaacgtcaggctcgttggtgacggccaggatactcttattaagcgtgatcggcaccgcttccttaccttcaaactgcgcttccgtcgttgacagcgggttatgcacctcaatgtaacggctaccgtccggctcggtggtggcttttaccggttcatcgataaactgcacgcgggtaccgaccggcacattttcaaacaggaatttgatatcgtcgttgcgcagacgtacgcagccgtggctcacgcgaagcccgatgccgaagttggcgttggtgccgtgaatagcatacaggcgaccgatgtacagcgcgtacaggcccatcgggttatccgggcccgcaggtacgacggcaggcagcggctcgccggcggcgcgatattcagcgtgcatttttgccgtaggcgtccaggtcggaccggcttttttacgttcaactttggtcgtccagttgataggcgtgtctttacctaactgaccgatcccaatcggcaggacgataacggtgtttgtgcctttcgggtagtaatagaggcgcatttccgcgctattgatgataatgccttcgtgtacggtatccggcaggatcagctgctgcggaatattcagcacggtaccgcccttcggcaggaaggtatccacgcccgggttggcttccagcatgttggacagccccatctgatactccgcggcaaaatactccagcggctgggtattgccctcaggaacggtgatgacctgattttgcccaattaaacggctaccatcggtaggcagcgggtaagtgactgctgaggctgttttacaaaaaccaactacagcgaaagccgccgcgaaaagcgttgttaatttcatattcatgttatgcgagattctgtgccaagcaggctagtaggttgagaattctgtcatgttgggagcgcattataggtgcattccagtaaacagggaattcagatgtgtacgaaatcacgtttttttcccttacggttcagtgtagccctttgtacagggcgcgatcttatttcagacttgtggcataataagcggtttgtcacatcttttttcaggataagcctgtgttagtttccagcaacgttaccatgcagttcggcagtaagccgctgttcgaaaacatttccgtcaaatttggcggcggcaaccgttacggcctgatcggcgccaacggtagcggaaagtccacttttatgaaaatcctcggcggcgacctggagccgacgctgggcaatgtttccctcgatccgaatgagcgcatcggtaagctgcgtcaggaccagttcgcttttgaaacattcaccgtacttgatactgtcattatggggcatggcgaactgtgggaagtcaagcaggagcgcgaccgtatctacgccttgccggaaatgagcgaagaagacggctataaagtcgccgatctggaagtaaaatacggcgagatggacggttattccgctgaggcgcgcgcgggcgaactgctgttgggggtgggcatcccgctggagcagcattacggtctgatgagtgaagtcgcgccaggctggaaattacgtgtgctgctggcgcaggcgttattctctaatccggacatcctgttgctcgacgaaccgaccaacaacctggatattgatactatccgttggctggagcaggtgctgaacgagcgcgacagcacgatgatcatcatttcgcacgaccgtcacttcctgaacatggtttgtacgcatatggcggatctggattatggcgacttgcgcgtctatccgggtaactatgatgagtatatgacggcggcgacccaggcgcgtgaacgtctgttggccgataatgcgaagaaaaaagcgcaaattgccgagctgcaatcttttgttagccgttttagcgccaatgcctctaaatcgcgtcaggcaacgtcgcgcgcgcggcagattgataaaatcaagctggaagaggtgaaagcctccagccgtcagaacccgttcatccgttttgagcaggataaaaaactgttccgtaacgctctggaagtggaagcgttgacgaaaggttttgataacggtccgctgtttaaaaatgtcaatttgctgctcgaagtcggggagaagctggcggtactcggcaccaatggcgtgggtaaatctacgctgctgaagacgctggttggcgatctggacgccgatcacggcaccgttaaatggtcggaaaacgcgcgtattggttactacgcgcaggaccacgaatatgaattcgaaaatgacctgacggtgtttgaatggatgagtcagtggaagcaggaaggcgacgacgagcaggcagtgcgcagtattctgggccgcctgttatttagccaggatgatatcaaaaagcctgcgaaagtcctctccggtggcgagaagggccgtatgctgttcggcaaactgatgatgcaaaagccgaatatcctgatcatggacgaaccgactaaccacctggatatggagtcgatcgaatcgctgaatatggcgctggagctgtatcagggcacgctgatctttgtttcgcacgaccgtgagttcgtcagctcgctggcaacccgcgtcattgaaattacgccggagcgcgtggtggacttcagcggcaactacgacgattatttgcgtagtaaagggatcgagtaagttattgtctgtaaccccgatagcgtcggggttacagaatgttaacaagataatttttattttttccgaatgcaatgtgaaaattatatatactcttaatattcgattttaaaattaaatgaaagaagaggaactatcataaaaattgcgaatatattttgtggtaaacatattgtaatgttattttctttataagaattcaagtgctattttatattcctttattgttcaacaaaaggaataaatatgagcattttggaacgcttttttggccgtaaagaaaaaaactcatctaatatacaaggtgttttagtagcgaatgctgaaattgataacccactaagtttagttgttgtatttgatactctcccggaaaataattcaaaagaactcacccgcttgttgcgtaattatcattccagtatgaaacaggcaacgtgtgaacttgtccctgaactggatttttttggtttagcaggatggggtaagcatgtaatatcgatggttggatttaaaacgccttaccctcaggaatcaatcgaacaatgcgtcgcgccagctcattatccccaggaagtaaaagagcaagtacgggcaaccagtgcaaatattattttatattataaggggtatgatacttcacctttagagcaatatgttgcgttggctgtggttgcaggtgcattaagtagcatgggggctgtcgctgtattaaatgaatcggctcacacttcattacctgcgggggtatttaagtctcaggagttgggtaagcatagtctggaaatattgcgtgaaggtttcccgctgacctctctattttgtggatttgtgaaatatgaagttgaggatatcgaaggcgtatggatgcgtacctatggtgctgattgctttgggctaccagatttcgcagcacacgcacaaggtcatcacgaagggcaaaaatattctgatattttcaataatgttctgcgttacctgcttgaaagtggagcagaaatggctgccgggcataccatgcaagtcggtaaaacgacatttatgaaactgcgcgatccccttgacgatgaatattacttacaggggcctggaaccacattagtggttgaactgattgaagaagatgagtgtaatgctcattgagaaatcggggcaattgccccgactctcgttaaagtgtaaacggcactttattttccagcacagcctgaatcacattcagtgcgccttcatgattattattatcggtagcgtaacgggcgatttatttaatgttttctgcggcattgtccatcgcaaaggaataacgcgccattttaagcatctctgcgtcattgccgctgtcgccaatggcgacgacattctgtggcgacagatcccagcgtttcagtaaccgcgaaataccgtttgctttatgcaggccgggaataatcagatcgataaagtcaaaaccacttgtggcgggcttcataatgccatcgagcgtaacgtgtagtttgtcgatcactaacgggatttgttcatccggtaggttgagcgaaaacttgaactgtacgtcatcaatctcctgataatcttttacaggtttcaggcgatggtagtgttttgccatcagggtaacgaatgcttctggcgcattttcgctgacatatgcactttgcagaccgcaggcgacaaaattaagttgcttatctttcagcaactcgccaatcacaatacgcgattcatgccgggtcagttcgccgtggaacagttgcttgccatgttcgtaaaccagtgcgccgttttccgcgacaaaagagatctcatcctttagctcaggaaagaacgaaataagctggtaatactgattaccgctggcgacaacgaactcaatgccgcgctttttcagttcctgaaattacgccggagcgcgtggtggacttcagcggcaactacgacgattatttgcgtagtaaagggattgaaagctaaacactgacgcccggtggcgctgtgcttaccgggcctacgtatcctggcgcgtaggttcggtaagacgggtgcgcccaggcaaagggcacaccgcaggtgagcgggaagggcggtacgaccgtcaaacgtccatacctaatgcccgcttgccgtgaatattcagatcgcgcagcgtgaagcgcccttcccaggtggtttcatagtcctcgcgcgggaaatcgcccggtgatgcgcctgtctccagcgccgctttcaccttacgcgcataggccagatttttctcacacattggcgcggcaggaatgtacatcacattgccccagccctgctgattttcgacggaggcgacggagtggatgacatcgcaatgccaccacacggaatccccggcttccagcggcggaatgctggttaacgccgccatcagtaaaggatgccactgttcagaaatcggcagcacccggcccggcgcgacgccgcataattcatcttccgggacatcatccagcagcgggcgcagcagaatatatgccatcgcctccgggatagggacgacatgaagcaacccctgaccgggcagcatatcggagagcgcggtccagccctggaaggtgcgaaataccgagcatttggtggtgttatccaccgtatactcttcaacttcggtacggtgtgccgcattccacggatcgtactgctcgacgttgccgttaaacacgctggcgaatacccgctgataggctggcagcagccagcgctccagcgcaccggagtcggtatgcgcccccagtcctttggatgtggtgcccggcgggcggcggcggatgcgatccgggtaaatgatgctgatatccggattaaaccatcgcttgccgtcgtgctctacctgccatagacggttgaggaacgactgcgccagcgccatctcttcactttggcgggcctgcatttgcgcctgcgaccagtagacaggatagatttcaggccgggaggcgctcagcgtaccgaaaaaattatcccccggtcctttatacacctcgtcaaaatggttcttgtccagatagtcgagcatcgactggtcccatgccagcgcctgttcgcgtggaaaatgacctttaatcaccgcgcacccgcggcgcttaacctcggcgcgggtggcatcgctaatgttgcccatcgccagttcgctaaaagggataattggccataccggctgcccctgcgccttcagatcgttaatttccgccacccgggctgctatggtggcgctcaaacggtcgaacaccgcctgtacgtcgccgatttgcgcgcgtagcgcctgcttcatctgacgaatggccgcttttgggtcggcgggtagcgtttcgtgggtaaaaggagtcgtcatatcaacctcatcatctttcgttcgaaagtaaaattagttacatctgatactttaagttaaaataaggttaatgcaagtttaaaatattgcaggagcgcacaaggagagaagcgagagaaaaacgtaaggtggccaggacgccttaatgtcttatgcggctattcctttcgttcagccacttttcattcgaaataaatttgtggttctgctcacattgttattaaaatgtttctggtcgcagttacagccaggagcttaagtatgaccgttaacgttgtcgttaccgatatggacggcacttttctcgacgatgccaagcagtacgatcgtgtacgcttcatggcgcaataccaggaactgaaaaaacgtaatatcgaatttgtagtcgccagcggtaatcagtactaccagttgatctccttcttccccgagctgaaagacgaaatttcctttgtcgcagaaaatggcgcgctggtgtatgaacatggcaagcagttgtttcacggggagctaacccaacatgaatcgcgtattgtgattggcgaactgctgaaggataagcaacttaattttgtcgcctgcggtctgaaaagcgcttatgtcagcaaaaacgctcccgagactttcgtggcgctgatggccaaacattatcaccgcctgcagccggtaaacgattatcacgacattgacgatatcctgtttaagttctccctgaatttgcccgatgaacaaattccgctggttatcgacaaactgcacgtatctctggatggcatcatgaagcccgtcaccagcggcttcggttttatcgacctgattatcccgggactgcataaagcgaatggcatcagtcgtctgttaaagcgctggaacaggtcgccacagaatgtcgtcgccattggcgacagcggtaatgatgcggaaatgttgaaaatggcgcattactcttttgccatgggcaatgccgcagacaatatcaaagcgctttcacgttatcacactgatgataataaccatcaaggcgcgctcaacgtcattcaggccgtgcttgacggcaccgatcccttctgattaacaggactgcgtaggcctattaaacgtagcgccatcaggcagttcggacatattgccgatggcgccagggtaaattacagcatatgttcggtacgggcgatgatatcgtcctgcgcatccggcgacagcgcggtgaagaaggcggagtagcctgccacacgcacgaccagatcgcggtactggtctggatgttttttcgcatccaacagcgtttcgcgtgacacgatgttgtactgaatatgccagcctttatgcacctcaaagaacgtccgtagcagaaccatcagtttctgtttgtcggattcgttttccagcgtcgttgggttcagtttctggttgagcagcacgccgccgagaatggaaccggtaggtaatttgcctacggaaccaatcaccgccgtcgggccgagatgatccgtacctgatgcagggcttgcgccttccgccagcggtgtatgcgctttgcgaccatccggggtagccatagtcgcggcgccaaatggcacgtttgctgagatagaggacgtaccggcgtaatagttgccgcccacagggccacgaccgtagcgcgggttatggtattgcttcagctcatcaatataggtctgataagcgcgcgccagcagggtatcgacactgtcatcgtcgttaccgtacttcggcgcgccgttaatcagacgctggcgcagctgctcatgggtcagcccgtcaaagtcatcggccagcgcggcggcaagctgctgttgaccgataacgccctgttcgaagaccagttttttcacggcggcgaggctgttgcccaggttggcgataccgacctggagaccggatacccagtcatatttagcgccgccttgcttgatactcttcgcgcgttcaatacagtcatctaccagcgctgagcacagaatatcgtggacgttctcttccagcatggtgtcgaccacatactcaatttcgatcgatttgcgcgtgtagtagcgaatttgggtatcccaggcggccatcacttcgtcaaaattgttaaagttgcctgcggagagcgccttttcctgcggcagaaataccttgccgctggtggcgtcgcgaccgccttccagcgccgccagcatgacgcgggcgaagttaataaagctcatgccggtgcagcgataaccccatttcccgccgacggcggtttcgatacagccgatcgccgcgtaatcgtaagcgtcctgtggttcgatccccaacttgataaattccgggatgacgatttcatcattgttaaacgccggcatcccaaagccgcagcggatgacctggacgcaggcgtcaaggaaatcgttactcattccggcgtgataacgcacactgaggttgggctgggtagaacgcagacgtccacaggactccagaatggcgtaagacagcggattcactgcgtccattggctgaccgttgatgagattctgaccgccaatggtgacgttttgatacagcgggctgcctgcggaagctttagagtgcgaaccggagcggatcttgtttacttccagcagtttcagccagcagctgtgcagcagttcaatggcgtgctcacgatccagcgtctggtttagttctacatcgcgacgataataggggtaaagatactggtccatacgaccaaatgacaccgagtgaccgttagactcaatttgtagaatcagctggatgaagtagcacaattgcagtgcttgccagaaggtctgcggcggttggtgggcgatcacctcgcagttttcggcgatggtaagtagctctttacgacggctttcacgggactcttcgcccgccatctggcgcgccagcgcggcaaagcgcgtgatgtgctggcttaccgcgtcgagcacaatatcaatcgccttcaggaactgctcgccatgcagatcttccagcacggtcaggttgatgcgtgagcggcgctcggcgactttatcgcgcaggccatcaagccctttttccagcagcagcgggaagttcaccgccaggtgcgcgtcaccggaggtcatattgccttcggctttgataatgccagtcgccagaagccctttttgttcatcggtaaacatgccgtagcagcgatcctggacggtttgaccgcgccaccacggacagacgtcgtgcagaatacgtttgttttcttcacttacggaaaaacctgcgccgggccggtctgccaggtcgtcgatctctttttcaatccacgagacggtatattccgggaaaatcggcgcggcgcggacttcacttgcctggttgccgacgatcagttcatcgtgttttatccagatagtgcgttccgccaggtgatgggccagcgccagcgcgcggcgtaccggaatcggtttatccagatgttgctgatacatttcggtataatgttgcgcgcgctcggtacagaccggcggtttcacgatatgtaccagcgcggttttgtgcgccttaatgcggtcactgagcgtgtccagtttcagttgggtcatgataattatcctcgtagggtcgcggttaaacctttttggcaggcgtacttctgggcaaaatcaagtaacgccggcgcatccagtggtttatccggggcatgatagggctgactgagtaagtggtatttattaatgcccagcgtgtggtagggcagaaaatgaatttccccgacgtgcagttcgtcggcggcaaagtcggtaatggctttaatggcctcctcatcggcattaaatccctgaatcagcgggacgcgaatcaccatttttttgcccgcggcggcgagtttcctgagattttccaacacccgcgaggcgctgccatcggtccactgcttaaacggcccgtcggcgacatgcttcaaatcagccagaaacagatcgatataaggcagtgagggcgcaatgtatttccatggaacatgcagacaggtctcaaccgccgtatgaataccggcgtcatggctggctttaaacagctctgccgccagctccggctgcataaacggttcgccgccggaaagcgtcagaccgccgccgctgcgatcgtaaaaaggtttatcgcgcagtaccgtcgccatgatctcatccacgctttttatttcgccgcacacggttaacgcctgtgtggggcagcaatgcgccaggactgaaaaatgggcgtcggtcagtttctcgcgatggatgagcaggccgtttagcgcgcgctcaatgacgtccggcgcggcttgcgcgcacaggtcgcatccttcgagacacagccgcgcgtcgtataacagatcctgagcgcgggcgcggctttccgggttctggcaccagcgacagcccaacgaacagcctttgagaaatactacggtacggataccggggccatcgtgggtagaatagcgctgaatattgaagatcataaacggcctctcttatttcatataaagattaaattactttcgaatgaaagttatcttgatgtgcgtcaacgaatggagaggttctgacaaagaggcgttaaatgaggtacaacatcacggtttgaggctgtgatatggcgtttaagatgatgccgcgctgcttgagccgatcgtcagtcggagcttgggtaagctggcttttcgtctgatggcagtaattatctgttgatacagcacggccataaaccgtgctttggtatgtttatccgtaaagtggctactgtccgcagacttcacagccggggttgcgcattaacttcatttcgcggaactgacaggtcatcgcatcgtacatgacgatttttccgctagcgggctgaccgtaatgcgccagcagcttaatggcctccattgcctgtagcgaaccgatcacgccaatcagtggcgccatcacccctgcctctacgcaggtcagagcgttttcgccaaacagacggctcaggcagcggtaacagggttcgttttcccgatacgtaaagacggtaacttgtccttccatacgaattgccgcgccggagattagcggcactttcgcggtatagcacccggcgttaagttgattacgtacgctaacgttatcagtacagtccagtaccagcgaatgcccggcaatcaggctggtcatagcgtcgtcgtccagccgcgcgttaacgggcgtaatggtaatatgcgggttgattcgcgccagcgcgtcgcgggcggactcaacctttggctgcccgaccgtggcgtcgctgtgcaaggtttgacgctggagattggaaacggaaacggtatcaaaatcgagtagcgtcagttgcccgacgccagcgccggccagatactgcgttgccgcgcagccgagtccgcccagcccgaccactaatacccgcgcatcttttaacgtttcctgcccttcaaaatcgaagccgcgcagaataatttgtcggttatagcgcagcatctcctggtcgctaagttccgccattacaggcctccgaacagagcattaaacggctcgacttccacccattctcccggctcaacattgccgcgttcacgctccagcacaataaagcagttgcccagactaaacgagctgaaaatatgtgaaccctggtgtccggtggtcgtgacctccagttcgccgttggcgctacgttgcagaatgccgcgctggaaatcgagacgccccggcgttttcttcaggcgagatgctgtgcgtacacgctggcgcggcggcactgcgcttgccgtgttgccgccaagcttcgccagtaagggctgaaccagttgataaaaagtgagcgccgcagagactggattccccggcaggccacagaaccagctattactgagcttgccgaaggcaaacggtttgcctggcttgatagccagcttccagaaggcgatttcgcccagctcctcaaggatggttttggtatagtccgcttcaccaaccgagacgccgccggagcttatcactacatcggcctggctgtcggcgtcgacaaacgcggcgcgaagcttaccgggatcgtcaggaataatgcctaaattgatcacttcgcagccaagctgttgcagcatcaaatgtatagttagacggttagtgtcataaatttgtcccgcctccagcggctggcccggaagctggagctcgtcgccggtcgagaacagcgctacgcgcactttacgtacaacctgtgcatcggcaattcccagcgacgccagcactggcagttcggcagtagtcaggcgcgtaccggccggaaagaccaccgcatcctggcgaatatcctcgccgcggcggcggatgttttgtccgcaacgaacatcggcggtaaaacgcacgccgtcatcggtttgttccgtctgctcttgcataactaccgcctcgcaacctgtcggcaccggggcgccggtcataatgcgaatgcaggtgcccgcaggccactctccctggtaaggctgaccggcaaatgctttgccggcgacgggcagcggcttatcggcggacaaatccgccatacgtaccgcataaccatccatagctgaattatcaaagccgggaacatcgaggggagaaacgatatcggtcgccaggatgcggccaaagcagttcaccagcggcaacgtttctacggcggtgagcggggtaatacgtgaaagcatctgtgtcagcgccgtttcaagcggcatcaatccggcggaaaattccatgaacatactcctgcgaggcaaaatcgaatccggctattatgtcagaaaacagtggcgggcagtatgctacctcggtcttagagacggccttgcgcctttacataccttacgcatctttctatattcaaaaatcgaatgaataactcacaacaattctgatagttatagtaaaagttgtgtgccaccgtaatggaccctaaaaatgaataaagcagtgattgcgattcacggcggcgcaggcgcgattgctcgcgcgcaaatgagccatgagcaggagctacgctatatccaggcgttgtcagagattgttgaaagcgggcaaaagatgctggaagcgggtgacagcgcgcttgatgtagtgacggaagcggtgcgtctgctggaagcgtgtccgctcttcaatgcgggtatcggcgcggtctatacccgagacgggactcatgaactggatgcctgcgtgatggacggcaataccctgaaagccggagccgtcgcgggcgtgagtcatgttcgccatcctgtgctcgccgccaggctggtgatggagcgcagcccgcatgtactcatggtgggggaaggggcggaaaactttgccttttcacaggggatggcgcgcgtttcgccggatatcttttccaccccggcgcgttacgagcaattgctggcggcgcgtgcggcgggcgaaatggcgctcgatcacagcggcgcgccgctggacgaaacgaaaaaaatgggtacagtcggcgcggtggcgcgggataaattcggcaatctggcggcggcaacgtctaccggcgggatgaccaataaattgcccgggcgcgtcggcgacagcccgctggtcggcgccgggtgttatgccaacaacgccagcgtcgccgtttcctgtaccggaacgggagaggtctttattcgcacgctcgcggcttacgatatcgccgcattgatggaatatggcggactcagccttgccgacgcctgtgagcgcgtggtgatggaaaaattaccggcgctgggcggcagcggtggattaatcgccgttgatcacgaaggtaatgtcgcgttgccgtttaacagcgaagggatgtatcgcgcctggggatatgccggggatacgcctaccacaggaatttaccgggaataaggagccgcaggtgccgcacagcgatgaactggatagccgcgatgttctgtccgtcagtggcctgaatatcgcgtttcaccacgaagggcaacaggtagacgccgtgcgtaatgtgtcattacgcctgaagcgtggagagactctggcgattgtcggcgagtcgggctcgggaaaatcggtgacggcgctggcgttaatgcggctgattgagcagtcgggcgcgaacgtgcgctgcggcgaaatgctgttgcgtcggcgtaatcgccaggtgattgagctgtctgagcagagtgacgcgcagatgcggcgtgtgcgcggcgcggatatcgccatgattttccaggagccaatgacctcgctcaacccggtatttaccgttggcgagcaaattgccgaatctattcgtttgcatcagggcgccagccacgaagaggcgctggcggaagcgaaacgtatgctcgatcaggtacggatcccggagtcgcaggcgattttatcgcgttatccgcatcagctttccggcgggatgcgccagcgagtcatgatcgcgatggcgctatcctgccgtccggcggtattgattgccgatgaacccaccacggcgctggatgtcactatccaggcgcaaattctgcaacttatcaaagtgttgcagcaagagatgtcgatgggcgtgatttttatcacccacgacatgggcgtcgtggcggatatcgccgatcgcgtactggtgatgtatcagggcgaggccgtggaaaccggcagcgtagagcagattttccatgcgccgacgcatccttatacccaaacgttactggccgccgtccctcagcttggcgcgatgcgcggccactcgctgccacgccgtttcccgttgatttccgctgacgaaccggccctttatgaatcgcagattgagcaagacacggtggtggaaggcgagcctattctccaggttcgggggctggtgacgcgattcccgctgcgtagcggtctctttaaccgcgttacgcgtgaagttcatgccgttgagaatatcagtttcgatctctggcccggcgaaacgctatcgctggtgggcgagtccggtagcggaaaatcgacgaccggacgcgcgctgctgcggttggttgaatcccggcagggggagattatctttaacggccagcgcattgacacgctgtctgcgggtaaactccagccgttgcgccgcgatattcagtgtattttccaggacccttacgcctcgctcgacccgcgccagaccgtggggtattccattatggaacctttacggattcatggtctggggcagggggacgctgcggcaaagcgcgtggcctggttgcttgagcgtgtcggattacgtcctgaacatgcctggcgttatccgcatgagttttccggcggtcaacgtcagcgcatctgcattgctcgcgcgttggcattgaatcctaaagtgattattgccgatgaggcggtctccgcgctggatgtttccgttcgcgggcagatcattaatttactgctcgatttacaacgggaaatggggatcgcctacctgtttatttcgcatgatatggcggccgtggagcgaattagccatcgcgtggcggtgatgtatcttggtcaaattgttgagatggggccgcggcgcgccgtttttgaaaatccgcagcatccttatacgcgtaaattgatggcggcggtgccggttgccgatccctccagacaccggccgcggcgcgttctgctatcagatgatatacccagcaatattcataaacgtggcgaagagacgcccgccgtttcattacagttggtcgggccgggacattatgttgcgcgacctcagcaggataatgcgctctcgcgcttataacattcagactggcagggtttcaggagaacaacatgacgcaatttattacgcataaatggctggcggcgctgggactggcctcatccattgcggcttttccggccctggcggccaaagatgtggtggtggcggtagggtctaatttcaccacgctcgatccgtatgacgccaacgatacgctctcgcaggcggtggcgaagtcattttatcaggggctgtttggcctggataaagacatgaaggtaaaaaacgtcctggcggaaggctataccgtttctgatgacggtctgacctacaccattaccctacggcagggggtgaaatttcaggacggcgcggattttgatgcggcggcggtgaaagcgaatctcgatcgcgccagcaatccggataaccacctcaagcgttataacctgtataaaaatatcgcaaaaacggaggtcgtcgatccggcaacggtaaaaattaccctgaaacagccgttctccgctttcattaatattctggcgcacccggcgacggcgatgatctcgccgcaagcgctggaaaaatatggcaaggatattggttttcatccggtcggtaccggtccataccagcttgaaacctggaatcagaccgactttgtcaaagtgaaaaagttcgccggttactggcagcagggcttacccaagctggattctattacctggcgtccggttactgacaacaatacccgcgcggcgatgctgcaaaccggcgaagcgcaatttgcttttcctatcccttatgagcaggccgcgttactggcgaaaaataaaaacctcgaactggtcgccagcccgtccattatgcagcgttatatcagtatgaatgtgacgcagaagccgtttgataatcctaaggtgcgtgaggcgttgaattacgctatcaatcgtcaggcgctggttaaagtggcgtttgccggatacgccacgccggcgacgggcgtggtgccgccgtcgatagcctatgcgcaaagctatcagccgtggccctataatccggctaaagcgcgcgaactgctgaaagaggcggggtatccagacggtttcagtaccacgctgtggtcatcgcataaccatagcaccgcgcaaaaagtgttgcagtttacccaacagcaactggcgcagattggcattaaagcccggataaccgcgatggacgccggccagcgcgctgcggaagtcgagggcaaagggcaaaaagagagcggcgtgcgaatgttctataccggctggtcggcgtcgacgggcgaagctgactgggcgttatcgccgctcttcgcctcacaaaactggccgccgacgcagtttaataccgctttttacagcaacaagcaggtcgacagcgatttggcggcggccttaaagaccaacgatccgcaggagaaaacacgattgtacaaagaggcgcaggatattatctggaaagagtcgccctggataccgttggtggtggagaaattggtttctgcgcacagtaaaaatttgaccggtttctggattatgccggataccggtttcagctttgacgatgcggatttgaagtaagtaatgcgatggggctggatggcgcgcgcgttgtccgccatccggtaaaaggttcgtgtgatgcttaactatgttctcaagcgcctgctgggattaattcctactctgttgattgtggcagtgctggtgtttttatttgttcatttgttgcccggcgacccggcgcggctgatagccggaccggaagccgacgcgcaagtgatcgcgctggttcgtcagcagctggggcttgatcagccgcttcatgtccagttttggcgttacatcacccatgttttacaaggcgatttcgggacgtcaatggtttcccgccgcccggtttctgaggagatcgccagccgctttttgccgacgctgtggctgacgataaccagtatgatatgggcggttctgtttggcatggcgatcggcatcgccgccgccgtgtggcgtaatcgctggcctgaccggttaggaatgacgcttgccgtgaccggcatttctttcccggcttttgcgctgggaatgttgttaatgcagattttttccgtggatctgggctggctaccgaccgtgggggcggatagctggcaacattatattttaccctccctgacgcttggcgcggcggtggcatcagtcatggcgcgttttacgcgctcctcgtttgtcgatgtcctgagcgaggattacatgaggaccgcgcgggcgaaaggcgtcagtgaaacgtgggtggtgttaaaacatggcctgcgcaatgcgatgatcccggtcgtcaccatgatgggactgcaatttggcttcctgcttggcggatcgatcgtcgttgaaaaagtgtttaactggccggggcttgggcgattactggtcgactccgtcgacatgcgcgactaccccgtgattcaggcggaagtgctgctgttttctctggaatttattcttatcaacttagtggtggatgtcctctatgccgccattaatccggctatcaggtataagtaaggatgcgattatttaactggcgccgtcaggcgattttacatgctatgccggtggtaaaacccgaccagatacgcacgccgtggcgggagttctggcgtcgttttcgccgccagcatgtcgcgttggtcgccgggggattcgtactggcgttaattctggtggcgatttttgcccgttggctgacgccctacgatgcggaaaactattttgactacgatagcctgaacaatggcccctctttgcagcactggtttggcgttgactcgctgggaagagacatctttagccgggttctcgttggggcgcagatctcactggcggcgggcgtgttcgcggtatttatcggcgcgataatcggtacggtgttgggattgctggcgggatattatgaaggctggtgggatcgttttattatgcgcatttgcgatgtgctgttcgccttccccggcattttgctggcgattgccgttgtggcggtgttaggcagcggtattgctaatgtgatcgttgcggtggcgattttctctattccggcgtttgctcgtctggtgcgcggaaataccctggtcttaaaacagcagacgtttattgagtctgcccgcagtatcggcgccagcgacacgacgattttgtttagccatatattgccgggaacggtctcgtcaattgtggttttctttacgatgcgtatcggtacgtcaattatttccgcggcaagcctgtcatttctcggattaggcgcgcagccgccaacgccggagtggggagcgatgctcaatgaagcgcgggcggatatggtcatcgcgccgcacgtagcgctcttcccggcggtggcgattttcctgacagtgctggcgtttaacctgttaggcgacgggttgcgcgatgcgctggacccgaagattaaggggtaagccagcccggtggcgttgacgcctggagggcctggaacgggctcgtcaggcgggataacacatccggcacccgcgccgggggaggtggcgttaaacccgactgccccacaaatcatattcgtcggcgttttccactttcacgcgcacgatatcgcccggcttgacgttggtttcgccgttcaaatagaccgcgccgtcaatttccggcgcatccgccatgctacgcccgatagcgccttcttcgtcaacctcatcgacgatcaccagaatttcgcggcccactttttcctgcaagcgctcagcggagatttgctgttgcagttgcataaagcggttccagcgctcttctttcacctcttccggcacctgatccggcagctcattcgcgcctgcgccttccaccgggctgtacttgaagcagcctacacgatcgaggcgcgcctctttcaggaagtcgagcagcatctggaagtcttcttccgtttcgccggggaagccgacaataaaggtggagcgtagggtcagttccgggcagatttcgcgccactgcttaatgcgcgccagctggcggtcaacggaaccgggacgtttcatcagtttaagaatccgcgggctggcatgttgcagcggaatgtccagataaggcaggattttgccttccgccattagcggaatcacatcatcaacgtgtgggtaggggtagacgtagtgcagacgtgtccagacgcccagttttgataactgctcgcacaggctcaccatactggttttcaccggttcgccattatggaatccggtgcggtgcttcacatctacgccgtaggcggaggtatcttgcgaaatcaccagaatctctttgaccccggcatcaaccagacgtttcgcttcgcttaatacgtcgccaatcggacggctgaccagatccccgcgcatcgacgggatgatgcagaacgtgcagcggtgattacagccttcagaaattttcagatacgcataatggcgcggcgtcagttttacaccctgttctggtacgaggcttaaaaatggattgtgcttcggcttcggtacgtaatgatgtacgtgctgcagaacttgctcatagctatgcggcccggtgatttccagtactttcggatgcacttcgcggatctgatcttcttttgcgcccaggcagccggtgacgattaccttaccgttttcgttcagcgcttcgccaatggcttccagcgactcttgtaccgcgctgtcaataaagccacaggtattaacgataaccatatccgcatcgtcatagcgtggcacaacgtcatagccttcggtacgcagctcagtcaggatgcgttccgaatcaacgaggtttttcggacagcccagggaaacgaagccgatctttggctggtgggttacattactcatagcttaaaaagtgttcatttattggaatggtcagggcagggattctacagatatccgaacaaaaattgtatcgcaatctcatcgagagcggcggcatcaaccgttgtggttatcagcaaaaggtgaaaaagggcacttctaagaaaattcttgatctctgacacccctttgtctaaaaaacgaccatactattaagttgaaccctggtagaaaagaggaggaaaaaaggtatggtcgttgacagactgagaaccgatcttctcaacaagctgataaacgcgcgtatcgatcttgccgcttatctgcaattgcgaaaagcgaaggggtatatgtcagtcagcgaaagtgacactctgcgtgacaatttttttgaactgaatcgcgagctccacgatcacgctttacggcagggactgcatctcgatcaggaagagtggaacgcgctgcgccgtgccgaaggcgcgcttgcagccgccgccgtttgtttaatgagcggacaccatgattgtccgacctttattgccgtcaacgcagataaacttgaaaactgtctgacaactttgacgctgagtattcagagtctgaaagcacattcaccgcttacacaggtctgaacaaggggaggcgactcctgaggaatccccagcaaaccaagacaggcatagtgttatgtgatctaattgattgcgctaacactttcaaggaaatcatcactatgcctgctcgttcattatgccaaaaatcctttaaaaatatactggagcctttgcacctttaccgccgtcaatctctgattgaggctaccagtgtagtgattaacagtgcatctcttacacttattcagtattgggcgtgatttgtcaggagtagcatcggtcaggcacaagacaaaacgtatcgatcgacttcggggaaagtctcacttgcagaatgaagtttcagatactttttcagcgtgttactaaaaaatcacggagggaatgacccgggttgtcatgctctcctatatgccagcctgttttccgccaaaggtgactaaattcggttcaccagacaatcgttgatgttcttagggaacggtatagtcgaattcactcctgaaacaggtacggaatgtcggccgtttactattctgaaacgttatttatatcaaataattaaattttatttttatctttgttattgtaacaataaattacatgtttctttctgttatcagcgaacctgaaccaattttaatggggggttagataaaagctaattcagaaaattatgtttttaagatatattgaattatcagatgctccattcaaatgagagacgagaatgcaaacgttagaacggttttttcttttcgttacgggggaccaacctgaacgatttgaaaaagcaaatagcagttgtgctgatagcgtaatccttgatttagaaaatgcggtgtcatctgagaaaaaaataattgccagagaaaatgctctgaatttcatgagtaatgatgaaaaagtactgattgctgtacgtgcaaaaattgtaataacttcacgcctggctggatcatatccttctgttgacggtatcacaactgaatttatgaaaaacgagttgacaatacaaaatgctattcactcctgtaaaatggggttcagtggcaaggtatgtattcaccctccacaaatttcacatgtaaacagagcattcagctatttaaaacaagaaatcgagtgggttccccagattatgcgactggctcaatatccccatggagcgttcagtcatgaagggcaaatggtggataaaccgttactggaaaaagcaaaaaggattttggctcatagcatttagtaaatatatgaaggagtcaccaatgaaagctttagtttgtgtaaaacaagttgtcgatcataacgttagaattagaataaagcgagatcattctgatgttgatatttctgattcaaaactcagtatcaatccatttgatgaaattgcagttgaagaagcagtacgtttaaaagaacggggattaatcagtgaggttgttgtagtgtctataggaaacacaggtgtaggggatgtattgcgtacagcactggcagcaggggcagacagggcaatatacatattaacaaaaaactctcttacaccactaattgtggccaaaactatcaccgctattacccggaatgaaaaacccgatattatattattaggcaagcaagctattgacgatgattgtaatcaggtaggccaaatgctggcagcattactcgatcttccccaagccactaatgttagtgaaattactatttctgataattcattaactgctgttcgtgaggttgatggaggattagaaacgttaaatttatccctgcctgcagtactcactacagatctacgtctgaatacaccgaggaatatcagcttgccgaatgttattaaagccaaaaagaaacctgttaaggagatagatttcgattcacttggtattaacccgtcatccagattgactattattaaagttgatgagccagcaagaaggaaagcaggcataatcgttccagatattaacacgctgctagataaattaaaaaacgaagaaaaagtaatttaaggaggaaaatatggcttctttagttattgctgaacataacggcaatactcttttaccttcaacactcagtactatcactgcggcaaaagccattaatagtgatatagatatacttatgttaggatatggtatagaaagtattgcagttaaagccagtcatattcaggggatatccactgtatttgttgctgacagcccactattcgaacaccttctggcagagaatgtggaaaaacagatcagctattttttgaatagtgggaaaaatcattatcagtccattctttttcctgcaagctcttttggaaaaaactgtgcgccacgcttagcagcaaaacttgatgtatctcagattagtgatattacgcgtgtcattgatcaacatacctttgaacgtccaatctatgcgggtaacgctattgccacagtacacagtgatgatgaatataaagtgataactgttcgtcctacctcatttgcggctgcggctgcggttgcggaagatgagggaaaagcccccattgaatttacagaggttgttcttggttcagatcaggtaaaatttattagccaacatgttaataaaagtaaccgtccagacttacaatccgccagagttgtagtatcaggtggacgaggagtaggaagtgcacaggcattcaaagaacttgttgataacctggcagataaattaggcgctgccgtgggggcaagccgggctgctgtagatgctggttatgcaccaaatgattatcagattggccagaccggaaaaatcgttgcgcctcaactttatattgctctgggaatttctggcgccatacaacatcttgccgggatgaaagagtcaggcgtcattgtcgctattaataaagatcctgacgctcctatcttttctattgcggattatggtttggtagctgatattttcaaagctgtacctgaacttatcgataaattataaatcatattttttcctccttaaaggtaacttttatgcaatatactgatattcaaatttggcagcctggcattctgcgcaacaccgattatcttaaccccggtcccgctaagctgctggccgccactctggataaagacatcaaaatctttaaagaggggggcgttctgccagaattatggcactggctctattttcttcctgtcgaccgccagtcagatctatctgctgatggtcatccgataaaaggtcattttataccccctgttggcgctggtttattgaggaaaaaattatgaaaagtattgaaagggataaatatcaggatattcgtgatgcggttcgttcattatgtagtgaatttgatgataaatatcaccgtaagatagatgaagcaaaagcctatcctgaagagtttgttaataaactaaccaaagctggttggctggctgcgctcatcccggaggaatttggagggtcagggcttggtttaactgaagcatctattatcatggaagagatcaatagatcgggtggaaactctggagcctgccatggtcagatgtataacatgaatacgttgttacgtcatggatccgataaacagaaagaattctggctgccacggatagctactggtgaatggcgcctgcagtcgatgggcgtcacagaacccacagcaggtacagataccaccagaattaaaactacagctgtaaaaagagaagaccggtatgtgataaacggacaaaaagtctggatttcacgtgttcaacattcagactggatgattcttctggttcgaactactccgcttgcaaatgtaaaacgtaaatccgaagggatgtctattttcatggttgatattaaagaagctatgaaaaatggaatgacagtacgacctattcccaatatggtcaatcatgaaaccaacgagctcttttttgacaacctggaaattcccgaagaaaatcttattggtgaagagggtatgggttttcattacatacttgatggtttaaatgcagagcgtaccttgattgcggcagaatgtataggcgatggatattggtttatggatcgtgttacccgctatacctgcgagcgtgaggtttttggtcgtcccattggtcagaaccagggggtgcagtttcctattgcagaagcatttattgcagtggaagcggctaatctgatgcgttttaaagcgtgcgagctttttgatcagcatcttgattgtggagcacaggctaatatggcgaaataccttgctgcgaaagccagctgggaagcagccaatgcctgcctgcaatttcatggtggatatggttttgcctgtgagtatgatatcgaacgaaagtttagagaaacacgtttatatcaggttgctcccatatctaccaacctgatcctgagctatatcgctgagcatgtgctggagatgccacgttcattctgatgtcaaatcaattggaaaaatattatgaaacagttacctctgtccggagtcattatagtctcgattgaacatgtcattgccactcccttctgtacccgacagtttgctgattatttctcgcgggtaactataatagaatgccaagaaaacagggacttttcctgcaattatgatgaacggcttaaaaatgatttgtgtatattctttttcatctgagggagaaagctaaatataaatgttatggaatgcttcatcatcaccgacatttttttaatagttgataactggctatatagtcttataggcacctttttctaaggttgaacattcctataccatttcatctgttttatcactatgatatttatttcattggttacaatatgaatgcaattttatttacataatatagctgttcctacggtgctgaaaaattaaggagttaataatgaacgatacactttctaatacccagcaatcacgtgagacaatagaatgtgatgttcttattgtgggagcaggacccgccggattatctgcagctcttaaacttaaattacaggcaaatgatgcaggaaaagaactgtccattatcgtccttgataaaggagctgagcctggttctcatattctcagtggggcagtcatggatccccgagcgctgaatgaactaattcctgattggcaggaaagaggcgcacccattaaacagcctgttactcaggataaattactgttactgacgaatgaaaaatgtattaatttgccggatgcattgattcctgataattttcgcaaccatggaaactttatcgtaagcctcggtaatctcattaaatggctcgccggtcaggcagaaacgtcaggcgtggatatttatgcaggcttttcggcaactgagatactgtatgatcaggatactaacattatcggtgtagtaactggtgatatgggacgtcatcgggatggcagcaagaaagaggggttccagagtggaatagaaattctggcaaaatatacaatttttgccgaaggggcccgcggtagtctggctaaagaactgatcaaaaaatttcatcttgatacaggcaaagcaccccagagttttagcataggcataaaagagttgtgggaggttccatcagaccagtcccatccggggcttgtaattcacaccacaggttggcctctggataaagagtcgttcgggggtgggtttctctatcatcttaatgataataaaattgcactaggtttggttgtgggacttgattattcaaatccctggttaagcccttttcaggaaatgcagcgcctgaaaacacacccttctatacgcaaatacattgaccggggtaagcgtattggttatggcgcaagagcaatcaataacggcgggattgcgtctatgcctgatccctgtttacctggtggtctgctgattggttgtaatgccggtacgctcaatgcaagtagaatcaagggcatccatacagctatcaaaagtggcatgatagcggctgacgctatatttaatgctttgctggacaacaggaaaaacgacatactgacagaatatcaaacattactgcgacagagctggctttggcaggaactggaaaatggtagtaatttcaaaccctggtttaaaaaagggcgtgtgataggttttatcatgactggcattgagcattggctgcttccccgaatgggtataaaaaaaatcccctggcgtgtaaaaaataaccgaccggacaatatcactctgcaaccggccaacaaaagccagaaaaaactgtacgacaaacctgacggtaaactgacgtttgatattttgtcatccgtctatctcagtaacacctggcatgatgacgaccagccagtacatttgaaaatcagtgatcagaatatccctatatccattaatctggatatttatggtggccccgaagaacgatattgccctgccggagtatatgaatttttacaggatagtgaaacacaaaacatgcgtctgcaaataaattcacagaactgtattcactgtaaagtttgtgacattaaagatcctaaacaaaatataacctggactacgcctgaaggtggcaacggaccaaattatacagggatgtaacgctatcactcagtctgagctgtgagcatagtaaccagtttttgtgtgaagccgggtaatttgtcaaagcttctggcgcagatttgtaattttcttaatgaccaaaattcatcaagatcaataatcgaaaattcatgcaactgacgcaaacgggatgcagcagagtgaggcattataccaatgcccacttttgcttcaaccatacggcaaaatgtttcaaagttgccgacctgtattctaattttcagtttagatggtactagttctgccttttttcggataaattcaaacattcctgtcccttcaggcagactgatttgttcatattgaattaattcatgaaaggtcacgctttttctgtcagcaaagggatggtctgtcgcggtgataagcactagcctatcagtacggaacggcagtatttcaagattatctgttgtaatattaccagcaacaattccgagatcagttttcccctcaataacagaacgtacaatttccggacttggatactccctgagatcaatattcacatcgttatatagtgtaaggaaatggctcaacaatggggggagatactctgcaatagcagttatactggaaaatattctgacatgtcctttgatgcctttaacatgctcctgcatatcgctacgtaacatttccatctgattcacaataaggctggcgtggtgtttaaatgtttcaccagcagaggataacgttatccccttgctactacgatacagcaatctcagattgatactctgttcaagattacgtatacgcacgctaccagatgcggcagacatgtaagttttttccgctccacgtgttaagctcccttcttcactgatagcaaggaataattttaaatcttttatatcaaagtgcatcgttgtggctcataattaacgtataatacagtgtgctgcttttttatagactcagtcagactgagtatttcggcctatccgaattcctgtcacgtcgagataactacaaaatgtaggctgacggtgtcaccgccctaccatgatccggggatctggtaggacgctggtgaccgctgacagggggtcaggtcagacatattgtcggaaccgttgtaacgtagatgctaatacctgctccccgtggtcatcaggttaacccgtttacagcggttttttcagccccggcagatttatcataaactgatcaccgtaaatatgtggaatcagccaagtaaagaacagattggcaaacgccaccacaaacaatgatacgcctccataggtcaataaagcgcatacaagaataatcatcggcatggctttgttctggcccaccatacaggtcacagcactgacaattgagtagtaaaaaccagcaaattcaatcagcttgccaaatactgcgcccagcagaaagacaggaaaataaagttttacaaaaccgatcaacttatccataaatatatcactgaaaaccggggcgaccgtcactggacgggtgaacagaactgcgccaagtgctaccagcggagcaaaaaggatcacactgtaaccacgataagcgaccagcatcagtaatgaatacattcattgtcttatctcgctagcatgactacccattttatccatgttatgcaacagcttgtgtcatatttttctgatctccattttagatcagacaggctattactcagggattccggcgcgaagaatggaacatactctaaaaagtactcggcggattcaagtcggtatcactccgttaataatctttattctcgacccgctgcatgttgattttacggttaaacgccgttctcttattcatcgcaggagtaaaccatcatgacatgcagtgaaatccccagaaaacgatcatgtattcaatcgttgattatcgtttcgaataccgacttttatcgcaggatttatgatggctaaagtcgatgtgaaatgcccgttttgcgcgcaaacggcatccgttaaaaagtatggtccggggagtgcagggcaccagcattaccgctgtcaggcatgttgccgcagctttcaggtcgactatgaataccgcgcctgtcagcccggcatgaaagggcaggttgttgatcttgccatgtacaatgccggtattcgtaatccgcaggggctggccatcaatccctggagcggcgcgctatggctgcatgaacacggtccgcgcggcggcgatgaaattaacatcccggaaaaaggcaaaaattatggctggccgctggctacatggggcgttaactatagcggtctgaaagtgtcggaagccaaaggtaaaattgtcgcgggggcggagcagccggtttattactggaaagattctccggcaattagcgggatggcctttatatcagcgacgtttttgtgccgtgacggcacaaactgtttatcggcgcgctaaaagataaagaggtcattgtgatgcgcgtcgatggcaatacggtgacggaagaaggccgtattctgggtgacagaaagcagcgtattcgggatgtgcgtgtcggacctgacggctacttatatgtgttaaccgatgagtccgacgggcagttactcaaggtaagtcctgcagccacgcgttaggtcaccgggatcatcaccactttgcgaaaagcagggcgctcggtaagctgctgataccagcgctccagattcgggcgcggcgtccatttcagacccacgttcagcaggttatagacgaaaggcgcaatagcgatatcgccggtgccaaagttatctccggagaaccacggctggcgggccagagcatcatcaagaagcgcaaacaggccatcacacttttcgataccagcttcaattgccgcctggtcgcgtttttccggcggggttctgaccagtcccatcaggatcacgcggtgcgccgggcttaacgtttgattcgcccagtccatccatttttcgccctccgcacgccgcgccggattatcaacccatagccggttctggccgtattgcgccgccagatagcggacaatggcattggattcccacaataacaggtcggtttcatcatctttaagcagcggcaccagcccattaggattcatcgccagatagtcggcatcctggttaacgccgaattttccgcctgccagaatttgatcgtatggcagttccagctcttcaagcgtccacaacacttttttaacattagtcgagttgttccggccccacagcgtaatcatattaaccccttccgttttatcaggatgatgacagtaatcggcctaccgtgagataaacctaacatttacacaatggtctgtaaaaaaatcgttatgaaggaagcgtaacgggatgttattgcataaactttaaaaactttaccaagttacggtttctttaacgtcgtgagtgcgttattactcaccgcacttattacacggtggtgtgacgtgtgtttttggaatggatactcgggtggtactatgacgcaatacgcttcttcccttcgtagcctcgcggcaggttcggttctcttattccttttcgcttcgcctgtaaaggcagaggaacaaacgatcgcgccgccgggcgttgatgcgcgagcctggatcttaatggattacgccagcggtaaagtactggcggaaggcaacgccgatgagaaactcgaccctgccagtttgacaaaaattatgaccagctacgtggtgggccaggcgctgaaggcagggaaaatcaagctgaccgatatggtgacggtgggcaaagatgcctgggcgacggggaacccggcgctacgtgggtcgtcggtgatgtttctgaagccaggcgatcaggtgtcggttgcggatcttaataaaggcatcatcattcagtcaggtaatgatgcctgtatcgcgcttgccgactacgtcgccggaagccaggagtcctttatcggcctgatgaacgcctatgcgaaacgactggggttaaccaatacaaccttccagacggtacacggtcttgatgcgccagggcagttcagtaccgctcgcgatatggcgctgctcggcaaggccttgattcacgatgtgcctgacgaatacgccattcataaagagaaagaatttacttttaataatattcgtcaaccgaaccgcaaccgcctgttgtggagcaccaatctgcatgtcgacggcatgaaaacggggacaacggctggcgctgggtataaccttgtcgcctccgccacccagggcgatatgcgcctgatctctgtcgtgctgggggcgaaaacggaccgtattcgttttaatgagtcagaaaaactgctgacctggggtttccgcttctttgaaacggtcacgccgattaaacctgacgcgacattcgtgacgcaacgggtctggtttggcgataagcgtgaggtcaatttgggggcgggcgatgcggggtctgtgacgattccgcgtgggcagcttaaaaacctgaaggccagctttacgttgaacgaaccacagctcacggcgccgttgaagaaagggcaggttgtcggcaccatcgatttccagcttaacggaaaatccattgagcaacgcccgttaatggtgatggaaaacgtcgaggaggggggatttttcagccggatgtgggattttgtgctgatgaaactccatcagtggtttggcagttggttctcgtaaaataactccgttgccgggtgcgcgtcgcatccggctacgggcggttaatacatcagagtaatttgttgcgctttagcgtaggccacaaaggcctcatcgggacggcggtcgctgataatcgtatcaaagcgtgataattcccccatccgcgccggacgtaccttgccgaatttactgtgatccaccaccagtacatggcactgtgccattgtcattgcccaatgttttaccggcagctcttccagattaaagcaggtagcgcctttactggtatgaacgccagcggcggaataaaacgcgatatccggacaaatattgtttaacgtttcatggaaatcaagcggtttgaaaatggcgttgctggcgtgaaactccccgccgctgaggatggcgcggcaatggggtttgtcctgcagcgccagaaaggtattaagtgaatagcacaccgccgtaaagggaaggtcattatcaatggcttcaatgatccacggcgtggtggtgccacagtcaataaataccgtctgatgggcttgtaccaggcccgcagccaactgagcggctcggcgtttttcttccaccagacgagatttttgatcgcttaacagataatggctggcgctgcggggctccagtacgatatagccgcccagcaacacgacaggcgcgcttttatggttcaggtcgcgacgaatggtcatttcagagacgcccaacagggtcgcggcttctttaagatgaagtttatcgctgcgttttaaggcctgcagcaattgaccaatacgctcgtcgcgtcgcgtttccatagttcccctggagagttaaataagcgctccgcaccatacagagcgcttaatattactctttttttcgctatttagtcacgtacccagccttttcgaatgggcaatgcgaaacagaaacggtaacaacgttgcagcgcctggtagagcggcgcgccgtaccattgccagatcagctgtgcgctcaggcagccaagcatcgctaccagcagcgcgccaatcatatctaacggccagtgtacgccgagatagacgcgcgaccaggcgatggtcatggctatcgccatcatcacgatgcctgaccagaggcggtgccagaacaaaaacgccagcgcaaaggtaaaaatcaccgtaccgtgatcgctggggaacgagtcatcggcggcatgatgcaggaagttatagccgatatgatcgacaaacggacggtcgtgcgggaaaaggtgtcccattgtccaggagaccgccagactgataatcagcgcgatgccgattttaacgatcagctggcgctgggcgcagacccgatcgcggggcccccacagccagagtaccacggctaagagcgggacgatgttgatgacatctttggcgataaagatagcgagcgaaattatccactgcgcggaatcaggcgtggcgttaataaaataaaacagcgagttgttaaggttttccagcataacatccaggctcggagcaatgaaatcaaaagggatagccagctcatccccgtgcaaactgagcataaatgcagcgtaacagggaggaaaagcagtattgtcttatttggcggcaacatgaagagatttaagacaatggcataaaataacgttgatgataacggcgcaaacttaaattaaccttaaagtacgcaagcgctaagcggctttctgtaaaaatgtgcgctatttcccttgcagcctcataattcgctatctcagttccccgactttcattacactctgcgcggtttttattggcgaagagatggtatgcagaatcgtttacaatcaggcggcaggctgggacgtcaggcgctgctttttcctctctgtctggtgctgtacgaattttctacttatattggcaacgacatgatccagccgggtatgctggcggtggttgagcagtatcaggcgtgcctggactgggttccgacgtccatgaccgcttatctggcgggcggtatgttcttacagtggctgcttggcccgttgtctgaccggattggccgtcgtcccgtgatgctggcgggcgtcgtgtggtttattgtcacctgcctggcgacgttactggcgaaaaacatcgaacaatttaccttcctgcgttttttgcaagggattagcctgtgttttatcggcgctgtagggtatgccgcgattcaggagtcctttgaggaggcggtgtgtataaaaattaccgcgctgatggcgaacgtggcgttaatcgcgccgctactgggaccactggttggggcggcatgggtgcatgttctgccgtgggaggggatgtttattttatttgccgcactggccgctatcgcctttttcgggctacagcgcgcaatgccggagaccgccacgcggcggggcgaaacgctgtcatttaaggcgctgggccgggattatcggttggtgataaaaaaccggcggttcgtcgcaggggcgttagcgctgggatttgtcagcctgccgttgttggcctggattgcgcagtcgccgattatcatcattagcggcgaacagctcagcagctatgaatatggtctgctgcaggtgcccgtttttggcgcgctcattgccggtaatctggtgttggcgcgtttaacctcccgacgtacggttcgctcgctgatcgtgatgggcggctggcctatcgtcgcggggctgatcatcgccgcggcggcgacggtggtttcatcccatgcttatttatggatgacggcgggattaagcgtatacgcttttggcattgggctggcgaatgccggactggtgcgtctgacgctcttctccagcgatatgagtaaaggaacggtctcggcggcgatgggaatgctacaaatgctgatttttaccgttggcattgaagtcagtaaacacgcctggttaagcggcggcaatgggctatttagcctgtttaatctggcaaacggtattctttggctactgctgatgctggtcttcttaaaagataagcggacggggaattcgcaaacagtctgagagagcggctacgcctgataagctttctgttatcaggcgtagagaggcatccgctagacgttgaacggcggctcgttgtttaatacgctgtcgatgatatccagcacgccttcctgattgttcgatccggcgcggtatttcgccgccgccgcgaccgcttcgctggcgtgcgacatggcaaaactaaacccggcctgacgcagcatctcaatatcgttgccgccgtcgccgaataccaccacttcactatcatgaatgccccagcgctgctgtaacagacgcaggccgttggctttatgcacgccgggaattattaaatcaatactgccatagccggtatgaacggggaccatgatatcgccaatagcgtcgtgcagcgccgcctgtacttccggtatccgttcatcggtaatattaaggccgaatttgaaaaagacatcgttgatgttattaaaattatccacaaactccagacgatgataatacattgccgcaacggcttttaacgcatcgttgtaccgtttcagcgtgtaggcgctgttttttccacaggcgataatctccacatcggcgcgtgtgagcaggtgttcgacaaccgtctggaagtcggcttttgtcagctcgccgttaaaaatatcctctccttcgctgaccacccagccgccgttttccgcgacaaaagcgatttcgtgcgcaatttccggaaagaacgagattaactggtaatactggttgccgctggccacgacaaagcgaatgccttgccgcttcatttgttggtactgcgccataaaccggtcacggttataggttttttgatcgctcagaaacgtgccgtccatgtcgacggcgattaatttaatactcatgcgttatgctccatcaccggttgcggagtcgatacaggtttggcgacggccttcgccaccagcgccgccagaataaccagcgccagcacaaccatcatggcgctgcgtaatccatagtgctctcccagatagcccaacagcggcggcccgaccaaaaacgccagatagccggtcgtggcgacaacgctcacacgcgtcggcgcgtcgggaccggtatcgctggcggcggaaatggtcagcgggaagccgagcgaagcgcccaagccccaaagaatgaccgagacgccggcaacccagtcgctatcgacaaaaataatcaggccaatgcccaacgctcccatcaacgcgctggcgcgaacaaccgtcacccggctatagcggtcaataaaccagccgccggtaaagcggccaacggtcataccaagcgtgaaaccggcgtagatcagagagccggaggttgggctaaaaccgtgtccgtctaccatcagtagcggtagccagtcattcgcagatccttcggcgaatgccattgccagcaccaccacgccaataagcaaaagctggatgtcccgataaaaaggtaatcctttttcctgaaggtgagcatcttccgatgcgtttttacccgtaccgtcagggatcgcccgaatggcgatgaaaatgggcgcgatcgccacggcagccgcgaggatgatatggatgttaggcgggacgcttaatgcggttaacgccatgccgacaccagcgcccgccagcgtgccgaaactgtaaaaaccatgcatcatcggcagaacggttttattcagctcgcgttcgaccgccgcgccttcgacattaatcgccacttcggcggcgccaaaactggcgccgaaaacggctaatccaagggcaaaaatcagcggcgaggcgcaccacagcgcgacgctaagaataaccatcccgcctactgcgcaggtcatcgtcgtgcgaataaccttccgggtgccaaatcgtttcaccagccaggcggaacaaagaataccgctcattgaaccgatagaaagcccgaataagaccgcccccatttccgcggtagagacggaaagaatatcccgaatagcaggcgttcgggttgcccaggaggccatcagcagtccgggtaaaaagaagaacataaacagcgcccaggtacggcgttttaaggcgttacgtgaggagaggacggtcatagcgtcaggccagaaaatagaagcgagaggtaaacattagcaagcttgtgtacatttgtacatatcgtcgtcatacttcgttgtgcagacagtttttgctgtctgttttttcagcgtaagcggcaggctactatcgcctgcatcctgaatgagatgtggaactcatcatgaaagaaaatgccgtaagacgcgccaatgatcctaagcgacgggaaaaaataattcaggccacactggaagcggtaaagacctatggcgttcatgccgtgacgcaccggaaaatcgccgctatcgctcaggtgccgcttggctcgatgacctactattttgccggtatggatgcgttattgagtgaagcctttacacttttcaccgagaacatgtcgcgtcaataccaggacttttttgcgcaggtgacggatgcggagggggcgtgccaggcgataacggaaatgatttacggctcgcaggttacgacgccggataatatggcgttaatgtatcagttatatgcctatgccagcgataagccagcgttaaaaatagtcatgcaaaactggatgcagcgtagccagaatacgctggcgcagtggtttgacgcacagaccgcccgcgcgctggatgcgtttatcgaggggatgacgctgcattttgtaacggatcgaacgccgctggcgcgtgaagcgattttacagatggtaaagcgaatcgccggagagtcaatgtcgtgtcactctgcgtcaggcaacaaaaaacccaccaaccttgaaccgaaatggcggggttgatgggctccacaaaatggggacatcaaagaaaagcagtggcaataggtatgactgatgctttaacgaaaagttcgacctattggcaaaattttttcacttaaaggcaaacttcagttttatcctaaccccggccagatgatgacaataagcgtccccgccagcgttagcagaacgttggcgatggcgtaagtccccgcataacccagcgctggaatattactgcgcgccgtatcgctaatgatttccatcgccggggcgcaggtacgcgcgcccatcatggcaccgaacagcagcgcccggttcatgcgcagcacataagcgccaaacaagaagcagatcaccaccggtaccaggctgacgacaagcccggcgatcagcatttgtccgccgaccgcgcccagaccgttgctgataccgctgccggcgcttaaaccaacgcctgccataaacaccatcaagccgaattctttcaccatattaagcgcgccctgcggaatataaccaaaggtaggatggttagcgcgcaggaaaccgagcatgatcccggcgaacaacaatccggccgcgttgccgatgccgaaactaaaattgctgaactggaaggtaatcatcccgatcattaacccgatgataaaaaaagcgcagaaggcgagcaggtccgtcacctgactatggatcgaaataaaaccaatgcgatcggcgatggtttttacgcgtctggcgtcgccgctcacctgtaacacgtcgcctttattcagcacgacgttatcgtcgataggcatttcgatctggctgcggatgacgcggttaaggaagcagccatgatcggtcagcttgagctgagcgaggcggcgaccgaccgcattgtggtttttcaccacaatttcttccgtcacgatgcgcatatcaagcagatcgcgatcaaacacttccttaccattacggaagctgggatcgagcctggcgtgcgcgtccggatagccgaccagcgcaatctcatcgcccatttgcagcaccgcatcgccatccgggttcgccagaataccgttacgacgaatacgttcgatatagcagcctgtctggcggtaaatacccagctcgcgcaggtttttgccgtcagtccaggccaccagttccgggccaacccgataggcgcggataaccggcaaataaaccttgcgattagcatcggtatccagaccgcgctcgcgagcaatttgctgggcgctggtttgcaaatcctgatgctgtagtttaggcaagtagcgcgcgcccacgatcagactgaccaacccaatcagataggtcagggcatagcccaggctcagattatcaagagcggaggagagttgggtgctggcgatgccggaatgtcgcagggtatcgcctgcgccaaccagcacgggcgtggaggtcattgagccagccagcataccggccgtcaggccgatatcccagccgaatagcttaccaaggcctaaggcgattagcagagcgctaccgaccatgaccagggcaagcatcagataatttttaccgtcgcgaaaaaaaatcgaaaaaaagttggggccagcctcgacgccgacacaaaaaataaacagcataaatcccagatttagcgcgtcggtgttaatactaaagtgttgctgccctaataatagagagaccactaaaacgccaatggaattaccaagttggactgaacccagacgtaacttgccaagacacaggccaagagccaggaccacaaataataacaggatgtaattcccatttaacaaatctgcgacgtttatattcacggagactaacttcttgtttacgagtaagctgttgaaagaaatggtaatttacgctactgtttttatcatgaattaagggtgcaatcgtattgcatacagcatccaaataaaaacaacacaacaatatatcctgctagtttaatcttattgcgtactaacggctataagaatcgtgcaggtatgtttttggcatggaatgccacatgactttatctgactggatgcctcacggcggaaagcgtgttcgatagagagtgtcaggaggaacgattgaaacataaacacgggtgggcaagcgttgtctgctgctttgtactctttattgtggtgtgtctttcattaactatgcatgtacaaggcgcttttcgcgcggcagggcatcctgagattggactgttattttttacgttgcctggtgcggtggccagtttttgttctcaccgacgcgaggtgatccgaccgctgatcggggcgatgctggcggcgccgttttgcctggtgttaatgcgcgtggtatttatgcctacccgatcgttttggcaagaactggcgtggttatttagcgccgtattctggtgtgcgttaggcgcgctctgttatttgtttattagcagcctgtttagccaccggcgaaaaaaacgccaatagcgccctccggtagagggcgttgccagagcaatcaggcgaaaagattcagattttcttttgcccatgcttcaaaatccgtacagccgccgatatgtttttgatcgacaaaaatctgcggtacggtttctacaggtttacctacggttttttccaaatccgctttagtaatgccttcagcatggatatcaatatagcggtagttaaaatcgtcgcgttctttgctcagtttttccgccaactcttttgcacgcacgcaataagggcaccctgggcggccaaaaataacagtaaacatatctctcctcgaacataaagccagacggcgaacaggtgttatcatgccgcgatttacggcagatgaaaagcaggttacgcctgttcctttgataacccagggctatatctgttaagcacgccggaccagaacgttctacactgtgcgtcagttaaccgggaggcttgatatgcgcacgattggcgtgttacccaaaagcgtactgatactggaatgcctcggtatgattttgctggcgcttgctctgctatcgcttaatcattaccttacgctgcccgcgccgttcaatacgccgctggctggcgtattgatggttttcctcggcgtcgtgttgatcctccccgccgcggtggcgatgatgtggcgtattgcgcagttactggcgccgcagttgatgaaacgtccacccgacatttcttcccgttcagatagagaaaagcataatgagtccgaccattgaacttctttgtggccatcgttctattcgccatttcaccgatgaacccgtgactgacgcgcagcgagaggccattattgccgccgcgcgcagcacgtccagttccagttttttacagtgcagctctattatccgtattaccgatcgggcgctgcgtgaggcgttagtgcccctgacgggcgggcaaaagcatgtggcgcaggccgctgagttctgggtattttgcgccgattttaatcgtcatttgcagatctgtcctgacgcgcagctggggcttgccgaacaactgttgctcggtgtcgtcgatacggcgatgatggggcaaaacgcgctgacggcggcggaatcactggggttaggcggcgtgtatatcggcggcatccgtaacaatattgagtctgttaccgaactattaaaattgccgaagcatgtattgccgctctttggcctgtgtttgggatggcctgcggataatccggatctgaaaccgcgcctgcctgccgagcttgtggttcatgagaactagtatcaaccgcttgatgaaaagctgctggcgcgctatgacgagcagttggctgagtattatctgacccgcggcagtaatacgcgacgcgatacctggagcgatcatatccgtcgcaccctgattaaagaaaatcgcccatttatccttgaatatttgcataaacagggctgggcgacgcgctaaaacctgcgggccagtgtatgatacgcgggcttttcagggttttcagcgaggtgcagggtgaaaattgccatattgtccagggatggaacgctctattcttgcaaacgtctgcgcgaagcggcgatgcggcgcggccatctggtcgagatactcgatcctctttcctgctatatgaatattaatccggcagcgtcgtcgatccattacaaggggcgtcgtctgccccattttgacgccgttattccccgtattggttcggccattaccttttatggtaccgctgcgctacgtcagtttgagctattgggtagctatccgctgaatgaatccgtcgccattacccgcgcgcgcgataagctgcgatcgctacaacttctggcgcgccaggggatcgatcttcccattaccgggatcgcccattcgccggatgataccagcgatcttattaagatggttggcggggcgccgctggtcgtgaagctggtagaaggcacgcaagggatcggcgtggtattggcagagacgcgtcaggctgctgaaagtgttattgatgcgtttcgggggctgaatgcccatatcctggttcaggaatacattgccgaagctaaaggatgcgatattcgttgtctggtcgtcggcaatgaggttgtggcggcgattgagcggtgcgcgaaagccggtgattttcgctccaatcttcatcgcggcggggtggccagcatcgcgacgatcacgccccgtgaacgggatatcgccatcaaagccgcacagacgctggggctggatgtggcgggcgtcgatattttacgcgccgcgcgcgggccgctggtgatggaggtgaatgcctcgccgggactggaaggtatcgaaaagactacgggcgtggatatcgcggggcgaatgattcagtggatagaacgtcacgctacgcctgaattttgccttaaaatcggcggctaatcgcaatcatggattccgccgtagtacgaagcacgctttttgcgtaagctgtgccggtaattttttcatcgtcatcgtaagaggtagcacattattatgatatcactggtcgttcccactctggatacgttgcgtcaatggctcgacgacctgggcatgaatttcttcgaatgtgatacctgccaggcgctgcatttgccgcatatgcagaattttgacggcgtctacgatgctaaaatcgatttggtggacaacaccattcttttttccgcgatggcggaggtcaggccttccgcgttgctgccgctggcggccgatctctctgctatcaacgccagttcgttgacggtaaaagcctttctcgatatgcaggatgataatctaccaaaactggttgtgtgccagtctttatccgttatgcaaggcgtcacctacgaacagttcgaatggtttgttcgccaaagtgaagagcagatttctatggtgatccttgaggccggggcgcatcagcttctgtttaacgcggaagaagacgcgcaaaaaaccagcgcagttgaccattttcttcactaatcccttccgataatcaggcagtcgctgccagcgcggctgctgtttacgtttttttatgctgctattaacctttatttaaagaattattcacctcctttctgaccatttcgctttatcacatagacaaaacctgcataaaaaattgataaaaggcgttttttaatctgggctatagcctcaaaccttagctaaagttattcttgcgaagcttctatagcgagcttgatggcagggagggcgacctctcttcttcatttgtatcaaatgaaaaggtatgcacatttcaggcatgttttaaaccacgcctaatgggttcatttgttaacggatttcagaaggaaagcgatgatgaccgccttaaagaaaaaatggctatcgggtctggttgcgggtgctctgatggtcgtctctgtcggcacgctcgctgccgaacaaaaaacgctgcacatttataactggtcagattatatcgcgccggacacggtggcgaactttgaaaaagagaccgggattaacgttatctatgatgtctttgactctaacgaagtgctggaaggcaagttaatggcaggcagcaccgggttcgatctggtggtgccatcggccagttttcttgagcgccagctcaccgcgggcgtttttcagccgctggataaaagcaaacttcccggctggaaaaacctcgatcctgaactgctgaaactggtagcgaagcacgatcctgacaacaaatacgccatgccctacatgtgggccacgacgggcattggctataacgttgataaagtgaaagcggtgctgggggatgatgcgccagtgaatagctgggatttagtcctcaagccggaaaatctggagaagctaaaaagctgcggcgtctctttccttgatgcgcctgaagaaatttttgccactgtgctgaactatctgggtaaagatccgaatagcagcaaagcggatgactacaccggcccggcaaccgatctgttgttgaagctacggccaaacattcgctattttcactcctcgcaatacattaacgatctggctaatggcgatacctgtgtggccatcggctgggcgggcgatgtctggcaggccgctaaccgggcgaaagaggcgaaaaatggcgtcaatatctctttctcgatccccaaagagggggcaatggcgttttttgatgtgtttgccatgccggctgacgccaaaaataaagacgaggcctaccagttccttaattatctgctgcgccctgatgtgattgcccatatttccgatcacgttttctacgccaatgcgaataaagaggcgacggcgctggtcagccagcaggtgcgcgataacccgggaatttatccgccggcggatgtgcgggccaagttgtttaccctgaaagtgcaggagccgaagattgatcgcgtccgcacccgcgcatggacgaaggtgaaaagcggtaagtaattgattaacggtatggcctgataagcgtgcgctatcgggcattccaccgtttgtatcgtttgattgtgttatgccggagagcgccttgtgaatgatgtcccccaccgcccgcaggtgaaaacccgtaaagcgctgacgccgcttctggaaattcgcaacctgacgaagtcattcgacgggcaacatgctgtcgatgatgtcagtctgactatctataaaggcgagatttttgccctgctgggcgcgtcaggttgtggaaaatcgactctgctacggatgctggcaggttttgaaccgccgagcagcgggcaaattatgctcgacggcatcgatctggcgcatgttccgccgtatcagcgtccgattaatatgatgtttcagtcctatgcgttgtttccgcatatgacggtagagcagaacatcgcttttggtctgaagcaggacaaactgccgaaggcggagattaccagccgcgtcaatgagatgctgggtctggtgcacatgcaggagtttgcgaaacgtaagccgcatcagctttccggcggtcagcgtcagcgcgtggccctggcgcgcagcctggcgaaacgtcctaagctgctcttgttggatgaaccgatgggcgcgctggataaaaaattacgcgaccggatgcagcttgaagtggtggatatccttgagcgcgtcggcgtgacctgcgtcatggtgacgcacgatcaggaagaagcgatgacgatggcggggcgcattgccatcatgaaccgtggaaaatttgtgcaaattggcgaaccggaggagatttacgagcatccgacgacccgctacagcgccgaatttatcggatcggtaaatgtttttgagggcttactgaaagcgcgtgaagaggacggtctggtcattgacgcgcccggtttggttcatccgttaaaagtcgatgcagatgcctctgtcgttgataatgtgccggtatatgtggcgctacgtccggaaaaaatcatgctctgtgagtcgccgcctgccgatggctataatttcgccgtcggcgaagtggcgcatattgcgtatctcggcgatctgtctatttatcatgtgcggctaaaaagcgggcagatgatcagcgctcaactgcagaatgcgcaccgttaccggaaagggttaccgacctggggcgatgaagtgcgtttgtgctgggaagcggatagctgcgtggtcctgacggtataagggggaaacatgagcacacttgaacctccggcacgcatcagtaaacctggcggcgcggcgctatggttggcgcgaatgcaaatgaaacatgggcgtaagctggttattgctttgccttatatctggctcattctgctgtttttactgccgtttcttatcgtctttaagataagtctggcggaaatggcgcgggcgatcccgccgtataccgatctgctggaatgggctgacggtcagttgtcgattacgctcaatctcggtaattttttgcaactgaccgacgatccgctttatttcgaagcctatctgcaatcgttacaaattgccggtatttccacaatctgctgcctgctgctgggctacccgctggcgtgggcggtggcgcacagcaagccctccacgcgcaatatcctgctgctgttggtgatcctgccctcgtggacgtcttttttaatacgcgtctatgcctggatgggcattttgaaaaacaacggtgtgctgaacaatgtgttgctgtggctaggggttatcgatcagccgctgacgatcctgcacactaacctggccgtctatatcggcattgtttatgcgtatctgccgtttatggttctgcccatttataccgcattaacacgtattgattattcgctggtggaagcgtcgctggatctcggcgcccgaccgctgaaaacattttttagcatcattgtcccgctcaccaaaggcggaatcatcgccggctcgatgctggtttttatcccggcggtgggcgagtttgtgatcccggaactgcttggcgggccggacagtatcatgattggtcgcgtcctgtggcaggagtttttcaataaccgcgactggccggttgcttctgcggtcgccattattatgttgctgctgctgatagtaccgatcatgtggttccataaacatcagcaaaaaagtgtgggggagcatggatgaataacttaccggttgttcgctcgccctggcgcattctgattctggtgctggggtttacttttctctatgcgccgatgttaatgttggtgatttactcgtttaacagttcgaagctggtgacggtgtgggcgggatggtcgacgcgctggtatggcgagctctttcgggataccgccatgatgagcgcagtgggactaagcctgacaattgccgcctgcgcggcgacgatggcggtggtgctcggtactatcgccgcggtggtgatggtgcgatttggacgatttcgcggcgcaaacggctttgcgtttatgatcaccgcgccgctggtgatgccggatgtgattaccgggctgtcgctgctgctgctgtttgtcgcgcttggtcatgctatcggctggccctccgatcgcgggatgctgaccatctggttggcgcacgtcactttctgtaccgcctatgtggcagtggtgatcgcttcgcgattacgcgaactggatcgttcgattgaagaggcggcgatggatcttggcgcggcgccgttgaaggtctttttcgtcattacgttaccgatgatcatgccagcggtgatctcgggctggctgttggcctttacgctctcccttgacgatctggtgattgccagcttcgtttccggtcccggcgccaccacgctaccgatgctggttttctccagcgtgcgcatgggcgtgaacccggaaatcaacgcgctggcgacgttaatcctcggcgtggtaggaatcgtcggatttattgcctggtacctgatggcgcgagcggaaaaacagcggattcgcgatatccagcgtgcaagacgcggctgaagccactaaaatcttccactatggcaatgcgttgccgcgcgggtcgcggcatcattttcagggaagacattcattgggatttataaagcaatcaacctcatcacatgcccgtttaaatgtgcctacgctggtgcaggttgcggctatggcgattattttgattcgcggtctcgatgtgctgatgattatgaataccctcggcatacgcgggatgggcgagtttattcatcgcagcgtgcagacgtggagcttaaccctggtctttctggccagtttagtgctggtctttgttgaaatttattgtgcgttttcgctggtgaaaggccgtagctgggcgcgctgggtgtacctggcgacacaaattattgtgagcggatatctgtgggcggcgtcgttaggctacggatatccggagttgtttagcatcgcgggagaatcgaagcgtgatatcctgcattccctggtcatgcaaaaactccccgatcttttaattctgtttctgctgtttattcccgctcccagccgtcggttcttccggctgcaataatgtgtataatcgtcgccccggataatatgaaggttttttggtatgcagtgcgcactctatgacgcgggtcgctgccgttcctgtcaatggattacgcagtcggttaacgaacaactttccgcaaaaacagccgatttacatcgtttgctcgccgggctgcctgttgaacagtggtgtgcgccgattggcggcccggaacagcatttccgcaacaaagcgaaaatggtcgtgagcggtagtgtagaaaaaccgctcttcgggatgctgcatcgcgacggtacgccggtcgatctttgcggctgcccgctgtatcccgcctcctttgcccccgtattcagcgcgctaaaaccttttattgcccgtgccggactcacgccttataacgtggcgcgaaaacgtggcgaactgaaatacctgttgctgacggaaagtcagttcgatggcggcatgatgctacgcttcgtgttgcgttcagaaaccaaacttacgcaactgcgcgcggcgttaccgtggctgcgcgcgcaactgccgcagctcagagtgatcaccgcaaatatccagccggtacatatggcgattatggaaggggagacggaaatctacctgacggatcagcaggcgctggcggaacgttttaacgatgtgccgctgtggattcgcccgcaaagtttctttcagaccaaccctacggtcgccagccgattatatgcgacggcgcgcgactgggtagggcaactgccggtacgccatatgtgggatcttttttgcggagtgggcggattcggcctgcactgcgcgacgccgcagatgcaattaaccggtattgagatcgcgccggaggcgattgcctgcgcgaagcaatccgctgccgagctgggattgacccgccttcatttccaggcgttggattccacccaattcgccaccgcacaaggtgaaacgcccgacctggtgttggtgaatcctccccgccgcggcattggcaagccgttgtgcgattaccttgcacaaatggcgccgcgttttattatttattcaagctgtaacgcgcagacgatggcgcaggatattcgtcatctgccgaactaccgtattcaacgtgttcagcttttcgatatgttcccgcataccgcgcattatgaggttttagcgttactgcgcaggctgtagcgccaaaagccagacatacaaaatatctatattaactatctaattatccataaataataataaccatgatcgatcgataaaaaactccgatcgatcgtggttatatattaccctatttttgcaaatcaaatcacaaataatcactttaaatcttttaatgactaattttgattattacagtgcgtgtaaggcaaaattagacaaggtggtttatcgggtaactttcaatagcatcagcgaagcaatacgtaacgtcagtaaaggggtcaatcatgacaacgaataggcacgcttatggagggcgttcagacgatgtttgccaaatttatagatgttattcaaacgtttttaactgaaccggcaatattaattgggatattagtcggtgttggctatgcgctggataaaaagacgcctataaaaattatcaccggtatgatcagcgcgatggtcggtttgatgatggtgttatttggcggctttcaattttcagccacttttaaaccggttgcagaggcagtcagcaaggcttatggcgtgcatggatacttaatggattcatatgccatgaaagccgcgacgcaaatagcgctgggcgataatttcggctatgtaggatacgtttttgtactggcgttttttactaacctgttattagttttatttggccgttataccggcgcaaaaggtatatttcttaccggtaataccggggtctctcattcacaggcagtactgtggttaatcgtcttctggctggggttcggttgggtacaatccattgtgattgccggggtattgaccggggtcttttgggcgttttcaactacgcttattgttaaacccatcgccaaagtgaccaataacgccggttttaccattgcgcataaccagatgctgggactgtggtttttctcgaaattcgcgcataaattcggcgatccggaaaagcatgacgccgaaaacctgaaacttcccggttggttagccatttttaaccacaacgtgacggcaatcgccattgtgatgacgctcttcgttggcggttttctattggcgacagggatcgataacgtacagttaatggcgaaaggaaaaccctggtatatttatatcatcaatctgggcctgcaattctctatgtatatggtcatcttgctgcagggcgtgcggatgatggtaggcgaaattaacggttcgtttaaaggatggcaggatcgctttattcctaacgctataccggctgtggatgttgctgctttattacctttttcgccgaacgcggccacgctgggattcgtcttttgtactttcggcacgattttttccatgggcatcctgctgctcatccatagccctattatggtattgcctggttttgttccgctcttcttttccggcggtcccatcggcgtattagccaaccgaatggggggatatcgttccgttattatttgtactttcctgttagggattattcagactttcggtacggtatgggccattcctttaaccgggctggcaaaagaaggcgtgggctggacgggaatatttgactgggcgactctgtggcctgcgatttgtgaattactgaaatttattgcttcaacgttccatcttggtccttattccatttaattgattcggtttatataaaggattttattatgaaagattctgtaaatattttattcgtatgcggttatggtgtaggcagtagcgtaatgttacagactgttgttaaaaaagcgttagcaaaatatgacttctcttttgatatggagcatacggcagcgggagaggtcggtggatttaccgactgggcagatatttatgcgatttcgaaaaaattgcttgatgtcgttagccttgaccctaaacacggacaatatcttattcccattgaaaatatcatggatggcgaatcaataggtaaacagatttacgatgtggtagagaaaaattttccgcacctgctcaacaaatgagggtgagtcatgaaagcgattattctgctgtttgacagtctgaataaaaactatttgccgccctatggcgatttgctaacgaaagcgcctaactttcaacgcctggcggcacatgccgccacctttgacaatagttatgtcggcagtatgccctgtatgccagcccgtcgggaactgcacaccgggcgctataatttcctgcatcgtgagtgggggccgctggaaccctttgatgattccatgccggaattattgaaaaaagcggggatctacacccatcttatcagcgatcatctgcattactgggaagacggcggcggtaactaccataaccgctatagctcctgggacgtagtacgcggtcaggagggcgatcactggaaggcaagtgttggcgagccgcccattccggaagtactgcgcgttccacaaaaacaaaccggaggcggcgtttccgggctatggcgtcatgactgggcgaaccgcgaatacatccagcaggaagccgattttccccagacgaaagtttttgacgccgggtgcgattttatccataaaaatcatgccgaagataactggttattgcaggttgagacgtttgatccgcatgagccgttttataccaccgaggaatatttatcgctctatgacgatgagtggcaaggcccgcattatgactggccgcgcggcaaagtcagtgaaagcgaggaggcgatagcgcatattcgctgtcgttatcgggccttggtttccatgtgcgaccgcaatctgggacgtatccttgatctgatggatgaacacgatctctggcgcgatacgatgctgattgtcggtaccgatcacggcttcttgctgggggagcacggttggtgggctaaaaatcagatgccctattataacgaggtggcgaataacccgctgtttatctgggacccgcgcagcgcggtatgcggagcgcgacggcagtcgctggtgcagatgattgactgggcgccaacgctactggattattttcagcaacctattcccgcagatatgcagggccaaccgctggcgaaagtcattgccagtgatgaacccgtcagggaaggcgcgctgtttggcgtgtttagcggacatgttaatgttaccgacggacgctatgtttatatgcgggccgcgcagccggggcgtgagcatgacattgcgaactacacgttaatgccgatcaagatgaatgcgcgttatgacgtggatgaactgggaaaattatctctggcacctccgtttaactttactaaagggcttcaggtattacgtattccggccagggaaaaatataaaggtgtgaatagctttggtcatctcttgtttgatctcagagacgatccgcagcagcaacatcctattcatgatgaggccatcgaagcaaggatgatcaacttacttatccgtttgatgaaagaaaatgatgctccggcggagcagtatcgccgtctgggtctggatgttgtctaaaaacgtaacaatgttgtaagccgggtgcgcgttagcgtcacccggcaagtattagtccgaatcgcctgttgatgcaggcgtttgagactgatgacaaactgtagaatgcccaatggcgctacgcttatcaggccaggatagtttccgatggcgacccgtgggctgaataaggtatttatactgccatttcgcaatacagtggggtaataatatacgtcttactgcgggaaccactgatcgctgattttctgataagtgccgtccgctttaatggcggccagcgcattattcagtttttccagcaacgccttattgtccgggcgcaccgcgatgccaagtccggtaccgaagtattgcggatcggtcactttctctgttgccggacccagttgcggattcgttttcagccactcattgaccactgcggtatcgccaaagacaccgtcaatacggccatttttcaggtcgataatcgcattctggtagctgtcgtaggccacggttttgacctccggatgtttatcctggagatatttttgatgcgtggtgccattttccataccgatacgcttaccttttagatcggtaaaggtcttataggtgtcttttttggcaatcaccagcgcagagttcgcataatagggattgctaaaggcgacctgcttactgcgctccggggtaatgtccattccggaaatgacggcatcatattttctgaatttcagcgccgggataagactatcgaaagcatgattggtaaaagtacattctgcctgcatttgcttgcataatgcggttgccagatcgatatcgaagcccacaattttattactcgcatccagggattcaaacgggggataggtggcggaaaccccgaaattgattttttcagcggcgatgctgccagtggcgaaagaggcgagtaatgcagccagaactaactttttcatgatgtcactcccgtaatcttatgattatgcgccgtgtctgcggcatagatttacaatgccatcaattgaatttgtatgcaataaaaatgattaaatattttgaaatggataaaaaaagacggacaagttaaccacttgtccgtcgggtttattcaatattatgcatcgtaggcttgataagcgcagcgccatctgaccattgtcgaacggcggcgagaatgccttatcctgcctggttaattgcgccgctcaaacgccagggctttacgctcaatcaaacgcatcatcagcgtcaatagaccgttgacgaccaggtaaattacgcctgccgcgccaaataccaccacatcgtaggtacgaccatagagcaactgactgtaccccatgacttccatcaaggtgatggtataggccagcgaggtacttttgaagaccagtaccacctcattagaataggaggagagggcgcgtttaaacgcatagggcaacaaaatcgccagcgtatctttcttactcatccccagcgcgccgcaggactgccactgaccttccggaatcgcgcgaatcgcgccataaaatagctgcgtggtataagcggcgctgtttagcgacaacgcgatcagtgcgcacagccacggttcagacagtagatgccagagtagcggatactcttgcagtgtcgggaattgaccgggtccgtagtagatcaggaaaatttgcaccaacaacggcgtaccggtaaacaacgtgatatagccgcgcaccagccacaccacgaacggcgtttttagcgtcaggatgatggtaaaaactaacgccagcaccaaagcgacggcaatagaagccacggtcagcgtcaggctggtgtgtagcccttttagcagttcaggtaagtactcaagcattagtctggcctccgctcaaaacgtgttgcgcgcaggtctatgcgtttgagaatgtactgactgatcagcgtaatgaccaggtaaatagccgccgcaataatgtaccagttaaacggttcctgggtgcgtgtggcaatacttttggtctgcaacatcagatcgttaacgctgataaggctgaccagagccgtatcttttagcaacaccagccactgattacccagccctggcagggcgtgacgccacatctgcggcatcaccagacggaaaaaaatcgccgtctttgataatcccagtgcctgacccgactcccactgaccagacggaacggctttcagcgcgccacgtagcgtctgcgacgcataggccgcatacagcagggacaacgcaatcacgccgcacaggaacggactgacgtcaaagttctcaatctccatttgcaccgggatctgcgtaaagccgagatggagggtaaacccgtcagacagcgtaagcaggagttgcgaggagccgaaatagataaacagcaccaccagaatttccggcaggccgcgcaaaatagtgaccagcgcggagcctatccaggcaatcgggcgccattttacggactcccagacggcaaagaacatggctaacgcgaggccaatgatcagcgcgcagacggcaaggccgacggtcatcccggcggcgcttgctaaaggaaaaaattcgttcatcaaagattacttctggaaccatttgttatagatggtctcgtaagtcccatctttcttcactttttccagcgcagtattgaatttctgctgcagctcggtgttgccctgacgtaccgcgatacccaggccggtgccgaaataatctttatcggtgactttatcgccgaccggcgccagcttaggattggctttcagccattcggtcacgaccgccgtgtcgccgaaaacagcgtcgatacggccattttgtagatccagcttcgcgttctgatagctgtcatacggtacggtggtgatttccggatgcttatccatgatgaatttctggtgcgtcgtaccgttctgtacgccgactttcttgcctttcagttgatcaacgctggtgtatttgccctgctgacccacgaacagcgcggagttgtcgtaatatggcgtggtaaacagcacctgcttttcacgttccggcgtgatatccattcccgccattacagcgttgaagcggcggaatttcaggctggggatcaggccgtcgaacgcctgattggtaaaggtacaggaggcgtcgatctctttacatagcgcgttggccaggtcgacgtcaaagccgacaatcttgttattagcatccatcgattcgaacggcggataggacgcttcggtcgcaaaacgaatggtctgggctgctgtagcggaaaggctaaagcctgcaattagcgcggcaatcagaacttttttcattgtcattgtcccgaatcttagtgagagagatagtttttgaacgcttcggtctgagggtgggcaaagcaacccgcatcaccgtgctcgacgatgtgaccattttccatataaatcacacgactggcggtcttacgcgccacttcgacttcatgcgtaacgatcacctgagtaatgttcgtttccgccagctcatgaataatgctgacgatttgagcggtaatttccgggtccagcgcggcggtcggttcatcaaacagcagcacctgcggctccatcatcagcgcgcgggcaatcgcgacgcgctgctgctgaccgccggaaaggtgcaacggataacgatcgctatatggcttcagacgtaaacgctccagcagcttttctgcgcgcgccagcgcctgatcttttgtcagacccagtacgcggcagggcgcttcaatcagattctgcacaacggtgagatgcggccaaagattatattgctgaaagaccattccgacattttgacgtagctcacgaatcgccttatcggacggcgttttcgtaaagtcaaaatggttcccggcgatagtcaaagtgccggagcgcggcatctcaagcagattgagtacacgcagcagcgaacttttacccgccccgcttgggccaagcaacaccagcgtttcgccttcggggcaatccagcgtgatatcgaacagcgcctgatgcgcgccgtaaaagcaattaatgccgtttaattgaatactcattgacactcgtatacaggcagtctgatagctattgaagccgcagatagtacctttcgcagaatagttatgcaatatttatgcgttaaaagttaaatatatcccacattcttccctaaacatagcacaaaatagcaggaggaatagtaggtaagaagaattgtcggcatcccgggcagaatgccagacaatttacggggttatgggtgcaaaagcgggggaatactgtctgttaacggttttctattgactggcgcagcgtaccggcaggggcatggacatctccgcccagatagcgaacgtcgtcaatcacccagcatgagccttcgtgaatcataagcacttcatcctgccagctttgatcgccctgttttaacgccacccgcagaggaatgttgcgcgcatctcggttcggaatggttgatgcgctggcgacgttggcgctatccggcagcgtagcgcggctggagaacagatcgccgctcatcaactggcggtgctccgtatcgcggctggcgtcggtcaacaatttcgccaggttatcactcaagtaggggcgaagcgcggcgatatcattgctgtggtgttgaatacggtagtcgtaaaattgttgagccacgctgtccgggccgccttccacacacgcgccgatacgcgggccattatctttgtaggcgggagtgacggtcgtacaggcgctaagcagaagcgcgcacgggatgagcaaagagagtttagaatagcgcatgatgatttccttataggcgatcgagcaaaaaccgatctacgataatcaattatatcctttcaatgatagcgtatcagcttgataatgcgtttgagatcgtgtgcttagctaacccgggagattcactatgcagttttcaacaaccccaacgctggaaggacaaagcatcgtggagtattgcggtgtggtaacgggcgaagccattttaggcgccaatattttccgcgattttttcgccggcattcgggatatcgtcggcggacgttccggcgcgtatgagaaagagctgcgtaaagcgcgtgaaatcgcttttcaggaacttggcgagcaggctaaagcgttgggtgccgatgcggtggtaggcatcgatattgattacgaaactgtcggcaaggatggcagtatgctaatggtcagcgtcagcggaacggcggtgaaaacgcgccgatgaaagcgctactgtggctggtgggtctcgcgttgctgttaacaggctgcgcgagcgaaaaaggaattatcgataaagagggatatcagcttgatacccgacatcgggcgcaggcggcctatccgcgcattaaagtcctggtgattcactatacggcggaaaactttgacgtttcgctggcgacgttaacgggccgcaacgtcagttcgcattacctgattcccgcaaccccgccattatatggcggtaaaccgcgcatctggcaactggtgccggaacaggatcaggcctggcatgcgggcgtcagtttctggcgaggcgccacgcgtctcaatgatacgtctattggcattgagctggaaaatcgcggctggcgaatgtccggcggggtgaaatctttcgcgccgtttgaatccgcgcaaattcaggcattgattccgttagcgaaggacattatcgcgcgctatgacatcaaaccgcagaatgtggtggcccatgcggatatcgcgccgcagcgtaaagacgatcccggcccgcgcttcccgtggcgcgagctggcggcgcaggggattggcgcctggcctgacgcccagcgtgtggcgttttatctggctggacgcgcgccgtatacgccagtcgataccgcaacggtgcttgcgttactctcgcgctatggctatgaagtcaaagccgatatgacggcgcgcgagcagcagcgggtgattatggcgttccagatgcacttccgtccggcgcaatggaacggtatcgcagatgccgaaacgcaggcgattgccgaagcattactggagaagtacggccaggattaacgcggtaaatttccgtgatcgcgcagccaagcggcggtgcgctcaatgccttcgtccagcgtgatgatgggctggtagcccagctcttcctgcgcgcgagtcgtatcgagcgtaaaatcaaaattcagttttgacacgccgtaatgcgttagcgggggctctttggcggattttttgccgaagcgctccatactgcgggcgatcatatccagcatcgggtaaggcacagagcgaatgcggcaatcgatagtcaattcatcaattaacttttgtacgatgctgcgtaaggtacggttttcgccgttagtgatgttataagcgcggccagaaggcagatgatcgcagcccggctggctggccagccacatggcgtggatcgcattttcatagtaggtcatatcgaccagcgcgctgcccccgtgcggtaataagacgctaccgtaatggtgcatcatatgcgccagacgtgggataaatactttatcgtgcgggccaaacaggctttgtggacgcaataccgtaaaacgtgtttgcggattggcctgcgccaacagattaatcacctcttcgccggcggctttactgcgggcgaactcattggcaaaccgatgcgggcggaaatcttctttgatatcacggtgatggtggtaatcaaaatagagcgagggagaggagatatgaataaaattgcgcacgccccaggcgaccgcccattctcccagacggcgggtggcgcgaacattcgccagatcgaaagcctgttgggttccccagggcgaggtaaagctggagcagtgccacaacgtgtcgatcccggcaagcatcactttagcctgcgaggagaccagttcggttaaatccgcatggacgaattccgcgcccattttttcaagcagcttgcccatcgcttcattgcgacccgtcgctctgacgctgatgcctttattgcgcaaaaattcaaccgcgtttcgacctaagccgctggtggcgccggtaaccagtaccttcatatcaatccactgtgtttaataaaccgtcgtgcgcattcttccgtgaattacgtcggtatgcaatgggaaacacgaaagaatacagcaactttttctcatttttctgtgatttgttctgcaaatcgggcaatacgccttgccattccccggaaaataaacaggtgcgccgggatcatcagtagccagtaaatcaggcccggcattccgtggggatgccaccaggcgcgcacgtcaatttcgcggtagcgacctttatcgtgcagcgtgaagctaagccgccccagacccggcgctttcatgccaaacaagagcgtgagctgtttttctggttcgacaatgatcactttccagctatctaccgtatcgccaggcttgagcaaggtatgcgacgggcggcctttcgccagtttatgccccaccagacggtccatcgcggcgcgcgtctgccacaaaatattgccgaaaaaatagccctctttgccacccagccgatttacgacctgccatagcgccgataggctggccggggtctgcgcggtaaagcccgcctgctttggaaaatagccgtattcgggacgccagcgggcgaaggccagcgcgtcgtagccccagtcgctggagttcaccagtttttcttcttcttttagcgtgcggcgaacggcgtcatcaaaggtgataagcgtttgggggatcaacttttttaacgcggcgtcatcggccagcaaatcgtgccttaacccctggattaaggcttttgcggtagtcggcggcacggaggtaatgacgtttaaaaaccagaccgaaatccagcgggtcggaaaaggcaccgggatcagcggacgccgtttaccgctgacggccataaaacgttcaaactgctgctgatagcttaatacctgcggcccggcggcttccagaatacgatgctcgtgcgcagggtggtccagcaagccgaccaggtagtagagtaaattttccagagcgatgggcgtggtgcgcgaacgcacccagcgcggcggcgtgagtattggcaggttgtaaaccatgtcacgcatgacttcgaaggcggcggagcctgcgccgacgatgatcccggcgcgtaattccgtcaccggcacgcctgcgtcgcgcagcgtgtcagccgtaagctggcgggcgcgcaggtgatcggattgctcatgctctggcgcctgcaatgaactgaggaaaataagttgtttaaccggcgtctggcgcagcgcgtctcgcacgttgagcgccgcctgacgctcatgggcgataaaatcgccgccttcgcccatgccgtgtaccagatagtaaacggtatcaatgtcgcgaagcagcgcgggtaaattttccggccagtgcagatcgaccttatgacaactgacgttggcgaggcgctgtttttccagacgttcgacgcgccgcgccgccgcccgcacctgatgtccttgctgacttagcgcaaagaccaggtgctggccgatatagccgctggcgccgagaaccagaatgcgttgcgccacgttgctctccttagcgggctaaaaaggcgcgccagtgggcgacgacgtcggcaagctgttcgcgagaaacatccagatgcgtcaccagacgcacactcggcgcggcgttaatcaggatattccgttcccgcaaatagtcgccaagcgcggcggcctgtgcttcgccaacgcgaacaaacagcatattcgtttcgtggcgcatgacctccgcgcccgcttcgcgaagctgctgcgccagccaggcggcgttatcatggtcctcttgcagacgcgccacgttatgcttcagcgcatacagtccggccgctgccagaatcccggcctgacgcattccgccgccgaccattttacgccagcgcgtcgcgcgtttaatgtaatcgcggttgccgaccagcagcgaaccgaccggcgttccgagaccttttgacaggcagatggtaaaagagtcgcaatactgcgtaatctcttttaactcacaaccgtaggcaaccaccgcgttaaaaattcgggcgccgtcaacgtgcagcgccagtccacgttcgcgggtaaatgtccaggcgtctttcagatacgcgcgcggcagcactttcccgttatgcgtattttccagactgagcaagcgcgtgcgcgcgaagtggatgtcatccgctttaatcttcgccgccacgttctccagcggcagcgtaccgtccgcggcggcgtcgatgggctgcggctgaatgctgccgagcaccgccgcgccgccagcttcataaagataattatgcgcgccctgaccgacgatatactcttcgccgcgttcacaatggctaagcagcgcgaccagattggcctgggtgccggtgggtaaaaaaagcgccgcttctttaccggaaaggtcggcggcgtagcgctgaagggcgttaacagtagggtcatcgccgtatacgtcgtccccgaccggggcggtcatcatcgcctcgagcatggcgcggcccggtcgggtaacggtatcactgcgtaaatcaatcatggcacatccctggattttaaaaggtgatgtgcactgttttaccttagccagttcgttttcgccagttcgatcacttcatcgccgcggccgctaataatggcgcgcagcatgtacaggctaaatcctttagcttgttccagtttgatctgcggcgggatcgccagttcttcttttgccacgaccacgtcaaccagtaccgggccgtcaatggaaaacgcgcgctgtagcgctccgtccacgtctgcggctttttccacgcgaataccggtaatgccgcaggcttcggcgatacgcgcgaaattggtgtcgtgcagttcggtaccgtcggtaaggtagccgccagctttcatttccatcgccacaaagcccagcacgctgttattaaagacgacgatttttatcggcagcttcatctgtaccaccgagagaaaatcgcccatcagcatactgaagccgccatcaccgcacatcgcgataacctgacgacccggcgcggtagcctgagcgccgagcgcctgcggcatagcgttggccattgacccgtggttaaacgagcccagcaggcggcgcttgccgttcatttttagatagcgggccgcccagacggtcggcgtgccgacatcgcaggtaaaaatagcgtcgtcagcggcgaaatgactaatttgttgcgccagatattgtgggtggatggctttatcgctgagtttggctaagtcatcaagccctttacgggcgtcccgatagtgctccagagctttatcgaggaatttacgattgcttttttcttccaccagcggcagcagggcgcgaagcgtggctttaatatcgcccaccagcgccatgtcgactttgctgtgcgcgccaatactgcccgggttgatgtcaatctgaatgattttggcatcgctcggataaaaggcgcggtaggggaactgggtgccgagcaggatcagcgtatcggcgttcatcatggtgtggaagccagaagagaagccaatcaggccggtcattcccacatcataagggttatcgtactcaacgtgctctttgccgcgcagggcatgaacgattggcgcttttagttttgccgccaacgcgaccaactcctcatgcgcgcccgcgcagccgctaccgcacattaatgcgatattgctggagtagcgcagcagttgcgccagttttttcagctcttcctccgccggcgtaacgacggggtgcggggcatggtaccaatgggtgacggcgttttcaggcgcgggtttcagcgccacgtcacccggaagtacgaccacggagacgccgcgatttagcaccgctttgcgcatggcgatggcgagtacctgcgggatctgctccgggctggaaaccaactcgcaatagtggctgcattcacggaacaactcctgcgggtgggtctcctggaaataaccgctgccgatttcactggacggaatatgggcggcgatcgccagaacagggacgtggttacggtggcaatcaaacaggccattgatcaggtgcaggttgcccggtccgcatgaaccggcgcacactgccagctcgccggtaagctgcgcttgtgcgccggcagcgaaagcggcgacctcttcgtggcgggttggcatccattcaatggttcccatacgattaagactatcgctcaggccgttcagggagtcgccagtgacgccccagatttgttttacgccagcctgttccagcgttttggcaataaaagcggcaacggtttgtttcatggttctccatctccttaaatgtgataacggttacaagtttagttgaagatgacgatgacgtttttctttggcgaagagaggggcgaaaggatgaagcgagcggcaaatcgcccggtagcgctgacgcttaccgggcctatgatggaacgtttaccgattatgcgagaacaagatcgctctgcggatggcaggagcaggccagtacgtaaccttcggcaatctccgcctcgctcagcgtcatggtgctgctcaccgtatagtcgccggaaacgactttggttttacagcagccgcaaacacctgcccgacaggcagcggcaaccggtactttattactctccagcgcctccagcagcgtcgtaccgatcggggcataaaattcctgcgctggctgtagtttggtgaatttcaggccgctggttgccgtttccgccaccggcgtgaagaacttctctttaaagaagcgcgttacgccaagcgctttcactccctgttcgacgaaatccatatagggcgccgggccgcaggtcatgatggtgcgcgatgccaaatccggtacgcgctgtaataattccgtggtcagacggcccgcgacaaaaccttccgtggcatgattttccgccactagcgtgaccggatactgtcgccactcgtcggcaaaaatcacatcatccggcgaacggacgttaaagatgacctgcacatcggcctgtgggcggtattttgccagccagcgacgcatcgacatgattggcgttacgccacaaccggcggcgagcagcagaaacttatcttctgttttatcgtcacaggtaaaatcgcccattgcatcagacagccagatgtaatcgccgcgcttgatgtcatgggtcaaccactgtgaacccgtgccatcgtcaatccgacgaacggtcagcgtgatatattcactgacgcccggcgtagacgaaagggtgtaggcgcgcagcgtttccgctgaattacgcacgctcaccagcgcatactgcccggcgcggtaagggtagtaatcatggcataatagcgcaattgtccatacatccggcgtctcctgacggatgtgatgcacctgcattcgccagggacactgtgaggttggcatcgtcatcattgacctccttacgcgctcagcaattgcttcatgtcttcttcaacggtggtcacggaacgcagaccgaacttctcgttgagcacagccagcagatccggcgtgaagaagcccggcgcggtcggcccggtgacaatatttttcacgcctaatgacagcagcgtcagcagaatcacgatcgctttctgctcaaaccaggagagcaccagcgatagcggcagatcgttgacgccgcagcccagtttttccgccagcgtaacggcgaggatgatggcagagtaagcatcgttacactgaccggcatcgaccagacgcggcagaccttcgatatcgccaaactccagtttgttgaaacggtatttaccacacgccagagtcaggatcaggcagtcatccggcacgctggtggcgaaatcggtaaagtagttacgctcgccgcgcgcgccgtcacagccgccgaccaggaagatgtggcgcagtttttcacgactgaccagatcgatgagcgtatcggcagcgccgagcagggtctgacggccaaaaccgacggtgatgagatgcggaatttcgctatacgggaagcccgccatttgctgcgcctgggcaatgaccggcccgaagtcatcgccttcaagatggctaacgcccggccagccgacgatgctacgggtccagatacggtcgtcatagctgcccacggtcgggtcgataatgcagttagaggtcatcacgattgggccagggaagcgggcgaattcgacctgctgattctgccagccgctgccgtagttaccgaccagatgcttgaatttacgcagttccggatagccatgtgcgggcagcatttcaccgtgagtatagacgttaacgccggtgccttcggtctgttccagcaggttgtagagatctttcagatcgtgaccggagatcagaatgcacttgccttcagtcgctttgacgttgacctgagtcggcgttgggtgaccgtatttggtggtttcaccggcgtccagaatgctcatcactttgaagttcatctggccgatttccattgcgcactccagcagcgcgttcatgtcagcaggccaggtgcccagccaggccatgattttgtggtactgcgcgtaaatgtcgttgtcgtattgaccgagaacgtgcgcgtgttccatatacgccgccgcgcctttcagaccgtacaggcacagcagacgcaggccgaggatgttctcgccaatggcggctttgtctttattcggggtaaattccgccgcctgacgttgcagttcgcccagatcgtcgctgaccagttgcagatcggccatcggattgtcgcaatgcgcattagcatccacgctcaggcactgcgctttcaacgcttcacgcaaggcaatcgcttcacgggcgtagccgacgatacgcggagagtcgaagttaacgttggtcagcgtggagaaaaacgcgcgcggcgcaaagttatcaacgtcgtgattaatgatgccatattcacgggccttcaccgcccaggcagacaaaccttgcaaagccgcaatcagcagatcctgcagatcggacgtttcagctgttttaccgcacattccctgcgcgtaggagcagccgtttccggctggtgtacggatggtttgttcacattgcacacaaaacatggtcacaccttttaaagttatatttaatatacatgtttaaggttatgcctgtgaacaaagggataaaagggatttctgccataatgtgcaaggagattgatttagcgcaattttggcggcagatgcctaccgccaaagaggtatcaggccgagaagaacgccattaagagggggaccagcaggctgaggataaagccatgtacgatagccgccggaacaatctctacgccgccggagcgctgtaataccggcaacgtaaagtccattgaagtcgctccgcacaggcccaacgccgttgaacggctgcggcgaaccagaccgggaataagcataatggctaagagctcgcgggccagatcgttaaaaaatgccgcgctgccgataaccggtccaaacgactccgtcagcaaaataccggaaagagagtaccagccgaaacctgacgccatcgccagggcggtttttagcggtaagtccaggataaacgcattaatcacgccgcccagtaatgagcttgccacgacaacgaccgcgaccatcattccccggcggttaagcacaatttgctttaaggtcatgccgctatttcgtagctgaatccccaccaggaacaataaaaagatcagcgtatattcactggcttcggtggcgtgctgtaaaacagagagtccgctcaggccgataacaaaccccaataccactacgccgcacagttgcagcgactccagcgccatggcaatacgcgaaggcagtttttcctgctgatgatggtgacgccacgggaggatacgttccagccacaataaggcggcgatattacacaataaaataatcgtaatactgacggcggaataatgaaaaatcgccaccagattactggcgaggttatccaaaaacgccaggcttattcccataaaaaagagaataagatacacgatccagctcagtagccggttaatgagttgtaatgcggctttatgtcgcagtggaatgagatagcccacaatcagtggaaccagaatgattaaaagtcctgaaaacatgaacagccgggcccttttttattgtttgaatagcgtacatgacactaccgaattccagactatcagtaaagcgacaccgtcagccgtacatttatcagacatttgccccaggcaaagggggggaatatcacgcctggcggacgcatttgccgttatactgcggtgaattttatggagtgatgacgtttttctggaggaagcatgattctcgaacgcgttgaaatagtaggatttcgcggtatcaaccgactgtcgttgatgctggagcaaaacaacgtgctgattggggaaaacgcctggggaaaatccagcctgctggatgcgctgactctgttattgtcgccggaactcgatctctaccattttgtccgtgaggatttctggtttccgcctggcgacataaaaggacgcgagcatcacctgcatattattctgacttttcgcgaaacgcagccagggcggcatcgggtacgtcgttatagagcgctggaagcatgctggtcgctttgcgaggatgattttcaccgtattttttatcggctagagggcgaatgcggcgccgatggcagcgtgatgacgctgcgcagttttctcaatagcgatgggcagccattactggtggaaaatattaacgatcaggtgcgccacctggttcgtctgatgccagtgctacgtttgcgcgatgcgcgctttatgcgacgtattcgcaacggtacggtgcccaatgtgccggatgttgaagtcacggcccgacagctggattttctggcgcgtgagctggcgacccggccgcaaaatttaaccgacgggcagattcgtcagggactgtccgcgatggtgcaactgcttgaacactatttctcagagcagggcgcaggacaggcgcgtcaccgactcatgcgccggcgttcgcaaaatgagcagcgtagctggcgctatctggatattattaatcggatgatcgacaaaccgggcagccggtcgcatcgggtgatcctgctggggcttttctccacgctgttacaggcgaaagggacgctgcggttacataaagacgcgcgaccattactgctggtggaagatccggaaacccgtttacatcccattatgctttcagtcgcctggcaattgctcaatctgttaccgctacagcggatagcgacaaccaactcaggcgaactgctctcgctaacgccggtggagcatgtcgtacggctggtgcgcgaatcttcccgcgtcgccgcctggcgtctgggcccgggcgggttaagcgcggaagatggacggcgtatcgcctttcatatccgctttaatcgcgcgtcgtcgctgtttgcgcgttgctggctactggtggaaggcgagacggaaacctgggttattaatgagctggcgcgtcagtgtggacatcattttgatgcggagggcattaaagtcattgagtttgctcagtccggcctgaaaccgctggtgaagttcgctcgccgtatgggaatcgagtggcatgtcctggtggatggcgacgaagcggggaaaaaatatgccgcgacggtccgcagtctgcttaataacgatcgggaagaagaacgcgaacatctcacggcgctgcctgcgctggatatggaacattttatgtatcgtcagggctttgccgatgtttttcaccgggttgcgcaacttccgcctaatgtgccgatgaatacccggaaaattatcactaaagctatccaccgctcgtcaaagccggatttggcgattgaagtcgcgatggaagccgggcggcggggaattgacgccgtgccgccgctgttcagaaagatgttctcgcgcgtggtttggctggcgcggggccgggcggattaacgtttgaatgtgaccggaacctgttcgacgacgctatcgagtaacgcatagcggcggcgatactcggcccgtttcttactggcgatctccgattcgctttttcgggcgatcgccagcggtagcgcatagtaatttcctttaattctttcaccgcctaacgattcccaaaacgcgtcatagtcggcatgcatttgcgtctttttatccatgtatcgccagctacggtaaacgtgcgcatcgttactcacggctataatctgctccgcctgaaagacttgcgcaaactgacagagagcctccatcacgatgcgtttgggaaaaagaccatggcaggctttggtcgcctgctggataatttcgtgagggacgtcgtttgccgcgccctgtaatccgccgataaatagtgtgcgttgttggttaaagcgacacagggtaaatgtgatctctgccagaatacgtaactgtgcgtcgcgaacaacaatagtgctttcaccttctttatccagtgagaccagactgactaaatcaagttgaaacaactcgccggttttagtttcaaatttagcaagattcaggccatactgacttaaatagctaacttgttgttcccgcgataaaagttggcgcatctgttgataatgaaaacacagcgcatctaaggcgaaatcgcgtttaatatttacagccatataaggacgatgtagccgaataggcaaacgcggctgacgagcaagtaacgtatttaactccggccattgggtgagattggtcagtaattggctggtcgcacgcggcatgactaatgagcggattaaaaacttgcgacgaaagctggctttacgccagaattttcctggctgtaattgcccgcgcgtcagacgaataaataattgtaaaggagagatgtaatctgaagtgtaccaggtattatctgtaagctgtgtcatgatcgtaatccgcgacataagattgtcgagattgaaccacaggaaacattaaccaatcgtcaatacagccggcgctatctttattgcgtcaggtttgtttagatacggtttactttctggttaaaattttgccgtcagggtttctatgcgtgctaagggaaagaaatttaaaaagcgttatctggtcattattttaattcttttagtgggggggatggctggctggcgaatgataaatgccccgctgccaacttatcagacattaatcgtgcggccaggcgatcttgaacagagtgtactggcgactggaaaactggacgcgttgcgtaaagtggatgtcggcgcgcaggtgagcggccagttgaaaacgctgctggtctccattggcgataacgttaaaaaagatcagctactcggcgtgattgacccagatcaggcggagaaccagataaaagaggtcgaggccaccttgatggagctgaacgcggagcgtcagcaggcagccgctgagttaaagctggcgcgggttacgctggcgcgccagcagcagttagctaagactcaggcggtatcgcaacaggatctggataccgcggcgacggagatggcggttaaacaggcgcgtattggcaccatagatgcccagatcaaacgtaatcgggcctcgttggacaccgcgaaaaccaacctggaatatacccgtattgtcgcccccatggcgggggaagtgacgcaaatcactaccctgcaaggacaaacggtgattgcagctcagcaggcgcccaatattctgacgctggcggatatgagcaccatgctggtaaaagcgcaggtctcggaagcggacgtgatccatcttcgggcggggcagaaagcatggttcaccattgcaggcgatccgcaaacgcgctatgaaggcgttttaaaagatattctgccgacgccggaaaagatcaacgacgctattttttattacgcccggtttgaagtgccgaatcccaaaagaatcttgcgtcttgatatgaccgcacaggtttatattcaactcatggatgtcaaaaatgtgctgattattcctctcgccgcgcttggcgaaccggtgggcggcaatcgttataaagtggcgctgttgcgtaacggcgaaaaacgtgagcgcgaagtggtcattggcgagcgtaacgatacagacgtggaagtggttaaaggtctggaagcgggcgatgaggtgatcatcggcgaaagcaggccaggagcgacgccatgacggcattgcttgaactgtgcaatgtgagtcgtagctacccctccggagaagagcaggtggcggtgttgaaagatatctccctgcaaatccacgccggggagatggtggcgatcgtcggcgtttccggttctggaaaatcaacgctgatgaatatcctcgggtgcctggataaaccgaccagcggcacttatcgggtggcggggcgggacgtctcgacgctggacccggacgcgctggcgcagctgcggcgtgagcattttggctttatctttcagcgctaccatctgttgtcgcatttaacggcagcgcaaaatgttgaaatccccgccgtctacgccggcattgaacgcaaaaaacgccaggcgcgcgccagagagttgcttttgcggctgggattaagcgatcgcgtcgattacccaccttcacagctttctggcggacagcagcagcgtgtcagtattgcccgcgctctgatgaacggtggacaggtgattctggcagatgagccgaccggcgcgctggatagccattccggcgaagaggtgatggcgattttgcgccaactgcgcgatcgcggacatacggtgatcattgtgacgcacgatccgctgattgccgcccaggcggagcggattattgaaattcacgatggcaagattgtccataatccgcccgcggaggaaaagaaacgcgaacagggcgttgacgctgccgtagttaatacggctcccggctggcggcaatttgccagcagctttcgcgaagcgctgtcaatggcgtggttagcgatggccgctaacaaaatgcgtactttactgaccatgctgggaattattatcggtattgcgtcggtggtgtcgattgtggtggtcggcgacgccgcaaaacagatggtactggcggatatccgcgctatgggcactaacacgattgatattcatccaggcaaagattttggcgacgacaatccgcagtatcgacaggcgctgaaatatgacgatctggtcgctattcagaaacagccgtgggttaactctgcgacgcccagcgtttcaaagagcttacgtcttcgctatggcaatattgatattgccgtaaatgctaatggcgtcagtggcgattattttaacgtttacggcatgtcctttagggaggggaacaccttcaattctgtacagcaacaggatcgcgcgcaggtggtggtgctggatgccaacacgcgacgccagctatttccaaataaagcgaatgtcgtaggggaagtggtgctggtgggtaatatgccggttattgttattggcgtggcggaagagaaaccgtccatgtacggcaatagcaatctgttgcaagtttggttgccctatagcacgatgtcagatcgcataatgggtcagtcatggcttaactcgatcaccgttcgtgtgaaagatggcgttgatagcgatcaggctgaacagcagcttacccgcctgctcaccttacgccacggtaaaaaagacttcttcacctggaatatggacagcgttctgaaaacggctgaaaaaaccacctatactcttcagttatttctgacgctggtggccgtcatttcgctggttgtcggcggcattggcgttatgaatattatgctggtttccgtcaccgagcgaacgcgtgaaatcggcatccgtatggcggtaggcgcgcgcgccagcgatgtgctacagcagtttcttattgaagcggtgctggtttgcctggttgggggagcgctggggattagcttgtcgatgttcatcgcatttatgctacagcttttcctgcccggctgggagatcggtttttcactgactgcgctggcgagcgcgtttttatgttcgacgtttaccgggatactgtttggctggctaccggcgagaaacgcggcgcgactggacccggtggatgcgctggcaagggagtaatctcgctgacgtcatttgtcggcctgataagatgcaacagtgtcgctatcaggcactggcgttaaataaaaatgccagccgatcgggctggcattttgcctcctggatgtacacaatgagacagaggagctatgcaacggcctctgcttcgatgggcacgatgacgctggcgtgattgccttttggcccctggtggacatcaaaccggacagactgtccggctttaagcgttctgtaaccatccatttgaatggtggaataatgggcgaaaatatcctcgccgccgccttcagggcagatgaaaccaaaccctttggcattgttgaaccactttacagtacccgtttccatgcttcgacatccttcgtaaatcttatataagtaagatggaatgaaccggtgacggagtgggggctgttcaaaacctcaccaactctcgacattacaatttagagaaatcaggcgaggcgtcaagcatcaggcaggggggatcgggtaaaaatgaatcaaaaatttgaagcagttaacgctattgccgggaatgtgacagatgtcgcggatggtactgatagatgttagttatctatcaattgaggtagattgattgtgtgcatagactctggtcagcggcagattttcctgccgacaaccgtaaccgataatgacgactgacaatgggtaagacgaacgattggctggattttgaccagttggtggaagatagcgtgcgcgacgcgctaaaaccgccatctatgtataaagtgatattagtcaatgatgattacactccgatggagtttgttattgacgtgttacaaaaattcttttcttatgatgtagaacgtgcaacgcaattgatgcttgcagttcactatcaaggcaaagccatctgcggcgtgttcaccgccgaggtggcggaaaccaaagtggcgatggtgaacaagtatgcaagggagaacgagcatccgttgctgtgtacgctggaaaaagcctgaatgcaggtataaaaattgggggaggtgcctatgctcaatcaagaactggaactcagtttaaacatggctttcgccagagcgcgcgagcaccgtcatgagtttatgaccgtcgagcatctgttgctggcgctgctcagcaacccatcggctcgcgaagcgctggaagcatgctccgtggatctggtggcgctccgtcaggaactcgaagccttcattgaacaaaccacacccgtactgcctgccagtgaagaagagcgtgatacgcagccgacgttaagtttccagcgtgtcctgcagcgtgccgtcttccatgttcagtcttccgggcgtagtgaagtgactggcgcgaatgtgctggtggctatctttagcgaacaggaatcacaggcggcttatctgctgcgcaagcatgaagtgagccgtctggatatcgtgaactttatttctcacgggacgcgaaaagacgaaccgagccaatcttccgatctcggcaatcagccaactggcgacgaacaagctggcggggaggaacgtatggaaaacttcacgacgaatcttaaccaacttgctcgcgtgggcggcatcgatccgctgattggtcgtgaaaaagaacttgaacgcgcgatccaggtcttgtgtcgtcgccgtaaaaataacccgttgctggtaggggaatccggcgtcggcaaaacggcgattgccgaagggctggcctggcgtatcgtgcagggcgatgtgccggaagtgatggccgattgcaccatttactctctggatatcggttcgctgctggcgggcaccaaataccgcggcgattttgaaaaacggtttaaggcgttgctgaaacagcttgagcaggataccaacagcatcctgtttatcgatgaaatccataccattatcggcgctggcgcggcgtcgggcggacaggtggatgcggcaaatctgattaaaccgctgctttccagcggcaagatccgggtgatcggctcaacgacctatcaggaattcagcaatatttttgagaaagaccgtgcattagcgcgccgtttccagaaaattgatattaccgagccttcggtggaagagacggtgcaaattatcaacggcttgaaacctaagtacgaagcgcaccacgacgtgcgttataccgcgaaagcggtgcgtgcggcggtcgagttggcggtaaaatatatcaatgaccgccatctgccggataaagccattgacgtgattgacgaagcgggcgctcgggcgcgtctgatgccggtgagcaaacgtaagaaaacggtcaacgtggcggatattgagtccgtagtggcgcgaattgcgcgaattcctgaaaagagcgtctcgcagagcgatcgcgatacgctgaagaacctgggcgatcgtctgaaaatgctggtcttcggccaggataacgcgattgaggcgctgaccgaagctattaagatgagtcgtgccggtctgggccatgagcataaacctgtcggctcattcttgttcgccgggccaactggcgtagggaaaactgaagttacggtacagctttcaaaagcgctgggtattgagctgttgcgcttcgatatgtccgaatatatggagcgtcatacggtgagccgtttgatcggcgcgcctccgggatacgtcggtttcgaccagggcgggctgctgacggatgcggtgattaagcatcctcatgcggtgctgttgctggatgagatcgaaaaagcgcacccggatgtctttaacctgctgctgcaggtgatggataacggtacgctgaccgataacaatggccgtaaggcggatttccgcaacgtggtgctggtgatgaccaccaacgccggcgtgcgagaaaccgaacgtaaatctattggtcttattcatcaggacaacagtaccgatgcgatgggcgagatcaagaaagtgtttacgccggagttccgtaaccgtctcgacaacattatttggttcgatcatctgtctggcgaggtgattcatcaggttgtcgataagtttatcgtcgagttgcaggctcagttggatcagaaaggcgtctctctggaagtcagtcaggaagcgcgcgactggctggcggaaaagggctatgaccgggcgatgggcgcacgaccgatggcgcgtgtgattcaggataacctgaaaaaaccgctggccaatgagttgctgtttggatcgctggttgatggcggacaggtcaccgtcgcgctggataaagagaaaaatgcgttgacgtatggcttccagagtgcgcaaaagcacaagccggaagccgcgcattaatcttcgtttcactgccgtacaaaccgggccttagcgcccggtttttttacgccggctaatagttagcctgatggcgttgtgctcgcggtaggcggacaaggcgcttgtaaattgcgtcatcatccggtaatcgacgggtcaaatgcgaaaaaaaagcccgacccgctgcgtgaaaagggatgctgaagccgctgttaccaatgccaaaaaaactaatcctcttctctgaaaagagtagtcttacacttagcacaaagaattcttctgtgattatcccatacctgtatcaaaccaacatcgctgaatttctcgtgaccacaactgtagcaggatattttgctcatattgtgttttttaatatattcatctttggtgggaagttgcttccagtagcctatcagtccgggcataacctctccttgagtgggttatgtaatttgcaaattatgataataattatataagaaatagttcagtatgaaattattacttatcacattttcgaaagcgaatgctattagcatcacactttctacgttgttatcaacgataatgctttcgtacaggtagcttagctgttggcagtgctataccccgtccaatcatccatcaacgccacccgtttaggccataacgtcccacgctgatacgctgcttcagccttatctgccaactggtgcgccaacgcatgttcaataacctcacgttgataatccgttgcttcaccagcccactcacggaaagtagaacggaagccatgttgcgttaagtcgatatatcccattcgtttcaatacagccaataacgacatatcagaaagtgtttcagcgcgaggggcagggaatacatgattgttatcttttaatcgtggtaaatcttttaacaaatcaacagcagcatcagacagaggaactcggtgcttttttactaccgagagatacttatgcaaacttttctaaagcgtttcaggtagggaagtagggctgttttacacaatctatagtaagtttggtgtagcaaccaaaggtccaaaaacaaacctttcatcaggaaaatcacagtaaaaacaagaagtttagatacaaaagcccgtactttcgtacgagctctttcttgaatatggcggtgagggggggattgactcgctttgctcgccccttcgggcagtctcctcgcaggctcgtcgtctgtccaactggctgcgccgctactcagcccatccctgggcctcgccccttcggggccagagcaagctctgttcaaaaacgctcccggcgtttttgtgtcgaaccccggtcggtggttctcatccccccttagtttgggggatatatataagcaaaaagcccgtacttctgtacaggctctcaacttgaatatggcggtgagggggggattcgaacccccgatacgttgccgtatacacactttccaggcgtgctccttcagccactcggacacctcaccatattgtattgctgcctgaccgcttggggggcaacggggcgctactatagggagttgcgctaaaacggtcaagcagaatttacatattcactgtcgtttgctcatgcaatagacataatccccgcccaaactggcgcggggaggcaaattagcgctgtgaatccaacatttcgttgtttttcaccacatcctgcgctttgctgtagctttctatcagcagttgataggccgggaatacctgagtataaacgtcggcccacgcggcggcgtcttcacggttccaggtgccttgcagctcagaggcgactgcggcagtatccatcggtacgacgccagcctgtacgatacgcgccagggtgatctcctgcgccatcttactgtaggtaccggatgcgtcgatcacggcaaataccttataaccttccgctaccgcgctaatggccgggaatgccatgcacacgctggtaatcgtcccggcaatgatcagcgtcttacgacccgtcgcttttaccgccttaacgaaatcttcgttatcccaggcgttaatttcacctttacgcgcaatgtactgcgcatgtggcgcattagcgtggatctccgggatcagcgggccgttcggaccttgcggtacggatgccgtggtaatgaccggcattttcgctaacgtcgccatcttcgccaacgccgcggcgcgagcgcgtaattccggcattggcatatcgcctacggtctggaaaagaccgctttgatgatcgattaaaagcatcacggaatcgttaacatcaattaccgggcgcaaaccattaaaattagcaggacttgacatcgtgttctccttcatgttttcagatttggccaaaacggccggagttgaaatcgcggactgcttctgcgatctcttgtttcgtgttcataacaaatgggccgtaacccacaatcggttcattcagcggctcgcctgataacagcaatacgctggcgtcgctgctggcctcaaggtgcagcgttttcccttgctggctcaataccaccagttgcgcttcgttgaccggcgtcgtgccgttcaccgtgatattgcctttcagtaccaccagcgcggtgctccatccttccggctgtgccaatgtaagctggcgattgcgttgcaggcgcatatcccagacattgagcggcgagaaagtgtgcgccgggccttttgtctcttcataacgccctgcaatgacccgcacgactccggcgtcatccggtaacgtaacggtcgggataacatcgtgggtaatgctttgataacccggggtggtcattttgtccttcattggaaggttaacccacaactgcaccatttccagttcgccgccccgacgggtaaacgcgtcggaatggaactcttcatgcaaaatgcctgcgcctgcggtcatccactgaacgtcgcccgggccgataacgccgccgcgaccggtagagtcccgatgctcgacttcgccactataaacaatcgtcacggtctcgaaaccgcggtgtggatgctccccaacgccgcgtttttcattacccggcgtaaatgtgtgcggcccggcataatccagcagcaggaagggactcaactgctgcgcatgtgactgataagaaaagagtgaacgaaccggaaatccatcgccaacccagtgcgggcgaggtgcggtatagacgcctgtaatctgtttcatggtgttctcctcagtggcgttgtcttgatgtgaataagcttatattcatgacaaaagcttcggtagtggctaaaatggctcataccgttccattaataggacaatgtaatgataaaaacggatctcaatgattttgcgtggtttgtgcatgtggtcgaagagggtgggtttgccgcggcggggcgtgcgcttgatgaaccaaaatcaaaactgagccggcgtattgcgcaactggaggaacggctgggcgtgcgattgattcagcgaaccacccggcagtttaacgttaccgaagtgggacaaacattctatgagcactgtaaagcgatgctggtggaagctcaggcggcgcaggatgccattgccgcattgcaggtagagcctcgcggtatcgtgaagctgacctgcccggtgacgctgctgcatgtacacatcggcccaatgctggcgaagtttatggcgcgttatcctgatgtttcgctacagcttgaagcgaccaatcgtcgggtggacgtcgtaggggagggggtggatgtggcgattcgcgtcaggccgcgcccgtttgaagatagcgacctggtgatgcgcgtcctggctgacagagggcatcgcctgtttgccagcccggatcttatcgcacggatgggaatcccttccgcgccggcggagttgagccattggccagggctaagtcttgcatccggcaagcatattcaccgctgggaactttatggcccgcagggcgcacgtgcggaagtccattttaccccgcgtatgattaccaccgacatgttggcgctacgcgaggcggcgatggcgggcgtggggcttgtgcagctacctgtcttaatggtgaaagaacaactggccgccggtgaactggtcgcggtgctggaagagtgggagccccggcgggaggttattcatgctgtgttcccatcccggcgagggctattaccttccgtacgtgcgttggtcgattttttgacggaagagtatgcgcggatggtggaagagtaacctgctcgtcattcatcgacttaatggacgcaaaaaaggccggttaaaccgaccttttatccagccgcccttcagggcgtgaggagacaattagcgactacggaagacaatgcggcctttgctcaggtcgtacggggtcagctcaacggtcactttgtcgcccgtcaggatgcggatgtagttcttacgcattttaccggagatgtgtgcagtaaccacgtgaccgttttctaactctacgcggaacatggtattaggtaacgtttcgagaacggtaccttgcatttcaatattgtcttctttggccatctaatcctctggggtatcactaccataatttgaaccggcaagataatgccgaacttcttttgataagtaaagatttgtgcgtttaaaacacagcaaaccaggtttagcacatgattccgcgacacacgacaacgccgcgttatacaccttttccctgatactaccgcctgatgaatcgacataagcgcaacatataagggaacggtgaaataaacgatgggcgttacctgacaacgggctgcgggataatgagctaaaccaattctgcggcagcaattataacaccccaataaaaaatgtgccgaaaacattcacttccggggcaaaaataatgtccgcggcacccaaaaacgggaggccagcggctgttggcgtaaggccgcgaggtgatcgaggtagtcacgacgtggaatttcaatggcaccgagcgaggcggtatgactattaagtacctgacaatcaataagtttaccgccgtgacggataaattcagcgcaaaaaaccagcagtgcggttttagaggcattctcctggcggctaaacatcgattcgccgcaaaacagcgccccctgcgagacgccatacatcccgccgaccagttcccgatcgcgccacacttcaatggagtgcgcgtggcccaattcatgtaatcggcgataggcttcctcaataccacgcgttatccaggtgccttcgtcacggtgattggcgcatccatcaatgacccgatcgaaagcgtaattgagcgtcacgcggtaaggggatgcgttgtgaaagcgcttcatgctgcgactgaggtgaaacttttcaggccacagcacggcgcgcggatcgggcgaccaccacagaatcgggtcgcccggcgaaaaccacgggaaaatcccgtgctggtaggccattaacaaccgggcagggctgagatcgccgcccagcgccagtaaaccgttaggctcgcgtaaagcgccttccggcgaagggaaggcgatagaatgtcgggaaagctgaaccagacgcatgacggcgaaactccagtacgcaagtcggatcgttcaataatagcttacagacgttgtttaaactgataatagcgcccttgtccggctaacaattctgcatgagtgcctcgctcaatgatgcgcccgtcgtccattacgatgatttgatcaaaacgggccaggccgcgcaaacggtgcgtcaccatcaggacggttttctcgcgcatcacatcggcaagtaattccagcatttcgctctcggtggtcgcatccagcccctcagtgggctcatccaacagcattaacggagcatcatgcaacagcgcgcgggcgatggccagacgacgaagttcgccgccggatagcagacgaccgccttcgccgagccagctattaagcccactatcttcgagcagattttcgaggccgacgtgacgcagcatatcggaaagggcttcgtcgctggcattgggcgccgccagtaataaattatcacgcagcgtggcgctgaacaggtggacacgctgcggcaccacgctgatagtccggcgtaaggcggattcgctcaacgaggatagcggaagatcgttgagcagaatttcgccttgttgcgggtcccaggcgcgggtgagtagctgcaacagcgttgattttccgcagccggtacgccccagaatagcgacatgctcgccaggattagcctgtaatgagagggcattgagcgcattaatcggctggtcgggataacgaaacgaaacgtcccgcagggtgagtgtgaccttttccggcgcgggagtttctgattgcggaaaggtcacctccggtttttgctccgttaattcagtgatacgaagcgcagaggcgataacctgccccagatgctggaatgcgccggtaacgggcgcaagcgcctcgaaagccgccagcgcgcagaagacaaacagcgcgatgagcgcgccgggctgcgtattgccgccaacgccgccggaggccatccacaacattaacatcaccgccagcgcaccaatcagcagcattaacgcctgcgataaggcggtgagttcagactgtcggcgttgggcctcatgccattgtaattcggtggcttccatttgcgcccgatagcgtttgctggcgccaaaaatggtgagttccgcctggccctgtaaccatgacgtgagctgctggcgatactgaccgcgtagatgcgtcagattttggccggtatttttgccggcgcgataaaacaccggcggcataataaacagcgtcaacagcataatgccgcccagcgtgatcgccagcgtcacgtcgagaacgctaagccccagggtgacaatcataatcactacaaaagcgccgaccagcggggagatgacgcgcaaatagagatgatccagcgtgtcaacgtcggcaacgatgcggttcagcagttcaccttgctgatatcgcgccagacccgcgggggagagcggtaaaagtttgctaaaggtataaatacgcagatgttgcagcacgcggaacgtggcgtcatgacttaccagacgttcaaaataacgaccagcggtacgggtaatggccgcgccgcgcacgccggctgccgggagcatatagttaaaactgtaaattcccgcgaagcctgcgatagcggacgcggacaggaaccagccggaaagcgtcagcagcccgatactggcaagcagggtcaggattgccagcgcaattcccagcgttagcatccatttatggcgtttataaagcgtcagataagggagtagcgcgcgcatttaaatatcctcctgacgatgagccaataacgtcgcaaaagcgccgttggcggcgctgagttcggcataactgccttgttcgacaatcgcgccatcttgcataacccagatagcgtcccagtcggcgagatcttccaactgatgcgtcaccattaatgtggtctggcgttttgacgccgcttttaacgcctgcatgacgcgttgctcgctgtgagcgtccaggcttgccgccggttcatccagcagtagcagttgacagggattaagtagcgcacgggcgaccgctacacgctgtgcctggccgacggaaagtctgctggcatgattgccgagcggggtgtctactccctgcggcagcagcggtaaaaactcgcttacccatgcggcgtcaagcgcggcataaagttcctgctcgctggcgtccgggcgcgccagtaatacattttcgcgtagcgtcgccgcaggtaattgcgggttttgcccaacccaggagagatgctggcgccaggattccggcgagagatcgcgaagctcgacaccgttaatacgcaaagatccctgataggagagaaaaccggataatacattcaacagagagcttttaccggaaccgctgcgtcctaccaggacggcgcgttctcctgccgctaatgagaaattcagcggcccggcaagcgttttgccttctggcgaggtgataataagattgactgcgtcaatggttacaggttcgttttccgccagctcaacttcgccgcgcgccgggtgggcgaggggtgtttccagaaacgtcttcagactatccgccgcgccaaccgcctgcgccttagcatgataaaacgtgccgaggtcgcgtaatggctggaaaaactccggcgcgaggatcaaggcgaggaacccggcggcgagcgtcacgccggtaccgtaatgaccaaagttcagctcgcccaggtaagagaagccaaaataaacggcgaccagcgcaatagaaagcgaggtgaaaaattccagcacgccggaagataaaaaggcgaggcgcagtacttccatcgtgcgctgacgaaaatcctgcgatgctgcgcgaatgctctcagtttccgcttctccacgaccgaaaattcgcagcgtttccatcccgcgcagacggtcaagaaaatggccgcttagccgggcaagcgccaggaaattgcggcggttggcgtcagccgcgcccatccccaccatcgccataaataggggaatgagcggggcggtgcccagcagaatcagcgctgccgcccagtttgacgggaaaatcgccgccacgattaagagcggtacgcaaacggcaagcgccatttgcggcagatagcgcgcataatagtcatgcatatcgtcaatctgctccaacaccagcgtcgcccagctaccggcgggcttgccctgaatccaggctgggccggcttgctgcagacgatccaacacctgacggcggatctcaaagcgaatatgttgtccggcatgaaaaccgacgcgctcgcgcaaccacaccacccaggcgcggaggacaaagaccagtatcagcaggataaaagggagcaacagcgcttcccgtggaatgttctccatgatcatatgttgcaggatacgcgccatgatccaggcctgagcgacaattaatacgccactcatgaaccccaacaggcgggaaatattcaaccaccgttgggagattacgctttgctgttttaaccagcgggtcagctctttttgacgggttttattcattgcacgcttagcaggtgagttattggaatttcaggcagggcaatgttacaacgacgcaaaaataaaggcgacttatagtcgccttttttacttttgttactgatttgtaaaaactatttgctcgcgtcggccagaccatcgagatagcgttcagcatccagcgccgccatacagcccgtacctgcagaggtgatcgcctgacggtaaatatgatccatgacgtcacccgccgcgaatacgccagggatgctggtttgtgtggcgttgccatgggtgccggactgaactttgatataaccattttccagctcaagctggccttcgaagagcgccgtgtttgggctatgaccgatggctacgaaaagtccggcgatgtccagcgtctcgatattatcgctctgctgcgtgtcgcgaagacgcagaccggtgacgcccatctgatcgccggtcacttcttccagcgtccggttggtgtgcagaatgatattgccattttcgactttatccatcaggcgcttaatgaggattttttcagcgcggaaaccgtcacggcgatggataaggtgcacttccgaagcgatgttggacagataaagcgcttcttcaaccgcggtgttgccgccgccgatcaccgctactttctgattgcggtagaagaaaccgtcgcaggttgcgcaggcggaaacgccgcgccctttaaaggcttcttccgatggcagccccagatagcgcgcggaagcgccggtcgcaatgatcaacgcatcacaagtgtactctgcgctgtcacctgtcagacggaacggacgattttgcagatccacgttgttgatgtgatcaaaaattatctcggtttcaaattttgccgcatgttcatgcatgcgttccatcagcagcgggccggtcaaatcgtttggatcgccgggccagttttccacttccgtcgtggtagtcagttgaccgcctttttccataccggtaataagtaccggctgtaaatttgcgcgcgcggcatacaccgccgcggtatatcccgccggtcctgagcccagaataagcagcttactgtgtttggtcgtgcccatgagatccccatagttgttggcagacaatgagcagaattgtagggaatttacagacgtaaaaaaagagcataacgattttgttaacaatatgtgtaatagcatgaaccgatgaacggccgcgacagcgacgttatcatcacaaactttaattaaaatcggtaacttataaggtgacgaaatgacagtttaccgccctctctaatgaataactggcatgttgtactaaaaatcgatgttttgctttgacaatcacctgctgttttgcgaaaacattcgaggaagaaaaaactgtgttatgtatgtgctgcataatcatgcatgtaaataccatgtttaccgggctagtgaaatctacgcatggcgtggacagacgccattcgtgatgtcgatagctgccgcgaggcaacggtcttctcaccatagaccaggcattgcgcgccgttaatccctctgggtttcggtctatcgtgatgggcagcgactctgaacagtgatgtgagtagagtcaggcaggagtagggaaggaatacagagagacaataataatggtagatagcaagaagcgccctggcaaagatctcgaccgtatcgatcgtaacattcttaatgaactgcaaaaggatgggcgtatttccaacgtcgagctttctaaacgagtaggactttcgccgacaccttgccttgagcgtgtgcgtcggctggagcgacaggggtttatccagggctatacggcgctgttgaacccgcattatctggatgcgtcacttctggtattcgttgagattaccttaaatcgcggcgcgccggatgtgtttgaacagtttaatgccgccgtgcaaaagcttgaagagattcaggagtgtcatttggtttccggcgatttcgactacctgttgaaaacccgtgtaccggatatgtcagcgtatcgaaaactattgggagagacgttgctgcgcttgccaggtgtgaacgacacccgaacttacgtagtgatggaagaggtaaaacagagtaatcgtctggttattaagacacgctaacacggaacaggtgcaaaatcgctgtagtttgattacactcctgttaatccatacagcaacagtgccggggcaacccggtgctgttgtccgttttagcatcgggcgggaaaagcctggaacctggagagccttttttgagccaggaatatactgaagacaaagacgtcacattgacgaagttaagcagcgggcgccgacttctggaagcgttgttgatacttattgccctttttgccgtctggttgatggcggccttgttgagctttaacccttcggaccccagttggtcgcaaaccgcctggcatgaacccatccataatttaggcggcgcgccgggcgcgtggctggccgatacactgttctttatttttggcgtaatggcctacaccatccctgtcattattgtcggcgggtgttggtttgcgtggcgtcatcagtctacggatgattacatcgactattttgctgtgtcgctacgccttatcggcgtgctggcgctgattctcacttcctgcggtctggcggccattaatgccgacgatatctggtatttcgcctctggcggcgtaattggcagcctgttaagcaccacgctgcagccgttgttgcatagtagcggcggaacgataatgcttctctgtatttgggctgccgggctgacgctctttaccggctggtcctgggtcagtatcgccgaaaaattaggcggctggctgcttaatatactgaccttcgccagcaaccgtacccggcgtgatgatacgtgggttgacgacgaagagtatgatgacgaatacgatgaagaaaccgacggcgtgcagcgtgaatctcgccgggcgcgtattttgcgcggcgcgttggcgcgtcgtaagcgactggctgaaaaattcagcaatccacggggccgtcagaccgatgccgcgctcttttccggcaaacggatggatgatgacgaggacattcagtatagcgcgcgcggcgtcgctgccgatcccgacgacgttctgttttcgggcaaccgtgcgacgcagccggaatatgatgaatatgatccgctgttaaacggccattctgtcaccgaaccggtcgccgccgctgcggctgcaactgccgtcacccagacgtgggcagcgtccgccgatcccataatgcaaacgccgcccatgcctggggctgagccggttgtcgcgcaaccgaccgtggagtggcagcccgtaccggggccgcaaaccggcgaaccggttatcgcgcctgcgccggaggggtatcagccgcatccgcaatatgctcaaccgcaagaggcgcaaagtgcgccgtggcagcaacctgtgcctgtcgcttccgcgccgcaatacgccgcgacgccagcgaccgcagcagaatatgactctcttgcgccgcaggaaacacagccgcaatggcaggcgccggatgccgaacaacactggcagccggagccgacccatcagccggagccggtttatcagccggagccgatagcggctgaaccttccaacatgccgccgccggttatcgaacagccggttgccaccgagcctgaacctgacacagaagagaccagacccgcccgtcctccgctttactattttgaagaggtggaagagaaacgcgcccgtgagcgcgaacaactggcggcatggtatcaaccgattccggagccggtaaaagagaacgtgccggtcaaacctacggtatctgtcgcgccgtccataccgccagtggaagcggtagccgccgccgcgtcgcttgacgcaggtattaagagtggcgccctggcagcaggcgccgcggccgctgcgcctgcatttagtctggctaccggcggcgcgccgcgtccgcaggtgaaagaggggattggtccgcaactgccgcgtccgaaccgcgttcgcgtgccgacccgacgggaactggcatcgtacggtattaagctgccgtcacagaggattgcagaagaaaaagcccgcgaggcggagcgcaatcagtacgagacgggcgcgcagctaaccgatgaagaaatagatgcaatgcatcaggacgagttagcccgtcagtttgcgcagtcgcagcagcatcgttatggtgaaacgtatcagcatgatactcaacaggcagaagatgacgagaccgctgcggaagctgaattagcccgccagtttgccgcttcgcaacagcagcgctattccggcgagcaacccgctggcgcgcagccgttctcactggacgatctggatttctcgccaatgaaagtattggttgatgaaggtccgcacgaaccgctgttcacgccgggtgtcatgcccgagtcaacgcctgttcagcaacctgtagcgccgcagccgcagtatcagcagccgcagcaaccggtagcgccgcagcctcagccacagtaccagcagccgcaacagccggtagcgccgcaaccgcagtatcagcagccgcagcagccggtagcgcctcagccgcagtatcagcagccgcaacagccggtagcgccgcagccgcagtatcagcagccgcagcagccggtagcgccgcagccgcagtatcagcagccgcaacagccggtagcaccgcagccgcagtatcagcagccgcagcagccggtagcgccgcagccacagtatcagcagccgcagcagccggtagcgccgcagccacagtatcagcagccgcaacagccgacagcgccgcaagacagcttgatccacccgctgttgatgcgtaacggcgacagtcgtccattacagcgtccgacgacgccgctgccttcgttagatcttctgacgccgccgccgagcgaagttgaaccggtagatacctttgcgctggaacaaatggcgcgtctggttgaagcgcgtctggcggatttccgcattaaagctgatgtggtgaactattcgccaggcccggtcattactcgctttgaactgaatctggccccgggcgttaaagcggcgcgtatctccaacctttcccgggatctggcgcgctcattgtcaacggtagccgtacgcgttgtggaagtcattccaggcaaaccttacgtagggttggaattgccgaacaagaaacggcaaaccgtttatctgcgcgaagtgttggataacgccaaattccgcgagaatccgtcgccgcttaccgtggtgttaggtaaggatatcgcgggcgatccggtagtggcggatctggcgaaaatgcctcacctgctggtggccggtacgaccggttccggtaagtcggtcggggttaacgccatgatcctcagtatgctgtataaagcgcagccggaagacgttcgctttatcatgatcgacccgaaaatgttagaactctcggtctatgaaggtataccgcatctgctgacagaagttgttaccgacatgaaagacgcggctaacgcgttacgctggagcgtcaatgagatggagcgtcgctataagctgatgtccgcgctcggcgtgcgtaatctggctggttataacgagaaaatcgccgaagcggcccgcatgggacgcccgattccggacccgtactggaagccgggcgacagtatggatgttcagcatccggttctggaaaaactgccgtatatcgtggtactggttgatgaatttgccgacctgatgatgaccgtcggtaaaaaagttgaagagttgatcgcgcgtctggcgcagaaagcgcgcgccgcggggattcacctggtactggcgacgcagcgtccgtcggtcgatgtgattactggtttaattaaagccaacattccaacccgtatcgcttttaccgtatccagcaagatcgactcccgcaccattcttgatcagggtggcgctgagtcgttattgggaatgggggacatgctctattccggaccaaactccaccatgccggtacgtgtccatggggcgtttgtgcgtgaccaggaagtccatgcggtggtgcaggactggaaagcgcgcggtcgtccgcaatatgtggatggcattacctccgacagcgaaagcgaaggtggcggtggcggttttgacggcggcgaagaattagatgcgctattcgatcaggccgttaatttcgtcacccagaagcgtaaagcgtccatttccggcgttcagcgtcagttccgcatcggctataaccgtgcggcgcgtattatcgaacagatggaagcgcagggtattgtcagcgctcaggggcataacggtaatcgtgaagtgctggctccgccgccttttgagtaaacctgtaagccggatggcgctgtgcaggctgccatccggcaacaaaattcagtattttcttctttcctcatgctgatttttggcctggaatagaaagcaaaaggagctcctggtcgggagtgtcgaaacctgaggaataatgatgaaaaaaatggcaatcgcctgtgcattactttcaagcgttgtagccagcagcgtatgggctgacgccgccagctctctgaaaagccgtctggataaagtgagcagctttcatgccacctttactcaaaaagtcaccgatggcagcggtgccgcggtgcaggagggacagggtgatttatgggttaagcggccaaatctattcaactggcatatgacgcaacctgacgagagtattctggtttctgacggcaaaacgttatggttctataacccgtttgtagaacaggctaccgccacgtggttgaaagatgccactggaaatacaccgtttatgctgattgcccgcaaccaggccagcgactggcagcagtataatattaagcaggatggcgataattttgtgctgacgccgaaagccagcaacggcaatctgaaacagttcaccatcaatgtgggacgcgacgggactatccaccagtttagcgccgtagaacaagacgatcagcgtagcgcctatcagctaaaatcccagcaaaacggcgctgttgatccgtcaaaatttacgtttactccgccgcaaggggtaacgatagacgaccaacgtaagtagaggcgatgagtgagcaatctgtcgctcgatttttctgataatacgtttcaaccgctggccgcgcgaatgcggccggaaaatttagcgcagtatatcggccagcagcatttgctggccgcaggtaagccgttgcctcgcgctattgaggccgggcatctgcactccatgattttatgggggccgccagggacggggaaaaccacgctcgctgaagtgatcgcccgctacgccagcgccgatgtcgagcgtatttccgccgtcacttctggggtaaaagagattcgtgaagctatcgagcgcgcccgccagaatcgtaatgctggtcgccgtaccatcctgtttgtcgatgaagtgcatcgctttaacaaaagccagcaggacgcctttttaccgcatatcgaagatggcactatcacctttatcggcgcgaccacggaaaatccctcttttgagctgaactcggcgctattgtcgcgagcgcgggtctatctgctgaaatcgttgaccactgacgatatcgagcaagtactggaccaggcgatgcaggacaaaacgcgtggttacggcgatcaggatatcgtgttaccgaatgagacacggcgagcgattgctgagctggtcaatggcgacgcgcggcgcgccttaaatacgctggaaatgatggctgatatggcggaggcggatgacagcggcaaacgcgttttattgcccgccttgttgaccgagatcgccggcgagcgcagcgcgcgttttgataacaaaggcgatcgcttctacgatcttatttccgccttacataaatcagtgcgcggcagcgcgccggatgccgccctctattggtatgcccgtatcattactgcgggaggcgatccgctgtacgtggcgcgtcgctgcctggcgattgcctcggaagatgtgggtaatgccgatccgcgcgcgatgcaggtcgccattgccgcgtgggattgtttcacccgcgttggcccggctgaaggcgaaagggcgatcgcgcaggctatcgtttatctcgcctgcgcaccgaagagcaacgccgtctataccgcctttaaggctgcgctggccgacgcgcgcgaacgtcctgattatgacgttcctgtccatctgcgtaatgcgccaaccaaactgatgaaagagatgggctatggccaggagtaccgctatgcccacgatgagcccaatgcctatgctgcgggtgaagtgtacttcccgccggaaatcgcgcaaacgcgctattatcatccgacaaatcgtggtctggaaggcaagattggcgaaaagctcgcctggctggctgaacaggatcaaaatagccccacaaaacgctaccgctagtgtaaacgttgcggtaaggttatctctaaatatgatgctccaggtatcatggcgttgatgatgaatctcgttatgcctgatagcacgttgcttatgaggtccgcgggtatagcgcaatggatgcgttgttgctgtcgtcggtctggtaaggcgaaaacgtcgctattacgtaaacgcggtttacgttcatcaatacaatcagaggcgatcatcaattgatcgcgtttccttttattattcgataagcacaggataagcatgctcgatcccaatctgctgcgtaatgagccagacgcagtcgctgaaaaactggcacgccggggctttaagctggatgtagataagctgcgcgctcttgaagagcgtcgtaaagttttgcaggtcaacacggaaaacctgcaggcggagcgtaattctcgatcgaaatccatcggccaggcgaaagcgcgcggggaagatatcgagcctttacgcctggaagtgaataaactgggcgaagagctggatgcggcgaaagccgagctggataccttgctggcggagatccgcgatatcgcactgaccatcccaaacctgcctgcggatgaagtgccggtaggtaaagatgaaaacgacaacgttgaagtcagccgctggggtaccccgcgtgagtttgattttgaaatccgcgatcacgtcaccttaggggaaatgcactccggcctcgactttgccgccgcggttaagctgaccggctcccgttttgtggtgatgaaaggacagattgcgcgtatgcatcgcgcattgtcgcagttcatgttggatctgcatacggaacagcacggctatagcgaaaactacgtgccgtatctggttaaccacgacacgctgtatggcaccggtcaactgccgaaattcgcaggcgacttgttccatacccgtccgctggaagaagaagcagacagcagcaactatgctttgatcccgacggcggaggttccgctgaccaatctggtacgcgatgaaatcatcgacgaagatcaactgccgattaaaatgacggcgcatacgccttgtttccgttctgaagcaggttcttatggtcgtgatacccgtggcctgattcgtatgcatcagtttgacaaagttgagatggtgcagatcgttcgcccggaagattctatggctgcgttggaagagatgaccggccacgcggaaaaagtgctccagctactgggactgccgtaccgtaaaatcattctgtgcactggcgatatgggcttcggcgcctgcaaaacctatgacctcgaagtctgggttccggcgcagaatacctaccgcgagatctcttcctgctctaacgtctgggacttccaggcgcgtcgtatgcaggcacgttgtcgcagcaagtccgacaaaaagacccgtctggtccataccctgaatggttctggtctggcggtaggtcgtaccctggtggctgtgatggaaaactatcagcaggctgatggccgcattgaagtgccggaagtattacgtccgtacatgaacggactggaatatatcggctaatcctcgctttctcctcttctaaaaagcgccttcgggcgctttttttatgccagtttgataccggacaataatccctaccctattaggggtaatactgatttcgaatgaaggtcagtttttaacactatttttctattttttcgatatatatcagactttatagcgaagttgtcgctatataaaattctatacatcgttttattgcttttttattgtgagcagcagagtgagcccttatgaaaactaagatccctgatgccgtgctggcagccgaggtgagccgtcgtggtttagtcaaaaccaccgcgataggcggcctggcgatggccagtagcgcatttaccctgccatttacccgcatcgctaacgccgcagaggcgataagcccgacgaaaaccgacgagaaagtcgtctggagcgcctgtacggtaaactgtggcagccgttgtccgctacgtatgcatgttgtggatggcgaaatcaaatatgttgaaacggataataccggaaacgatgattacgatggcctgcaccaggttcgcgcctgcctgcgcggtcgttctatgcgtcgtcgcgtctataacccggatcggctcaagtatccgatgaagcgcgtcggcgcgcgcggcgaaggtaaatttgagcgtattagctgggacgaagcctacgatatcattgccaccaatatgcagcgtcttatcaaagagtatggcaacgagtccatttatctgaactatggcacgggaacgctgggcggcactttgacacgttcatggccgccaggaaaaacgctggtcgctcgtctgatgaactgctgcggcggttatcttaatcactacggtgattactcttccgcgcaaatcgcagcgggtctgaactacacctatggcggctgggcggatggcaatagtccgtccgacattgaaaacagtaagctggtggtattgtttggcaataaccctggcgaaacccgcatgagcgggggcggtgtaacgtattatcttgaacaggcgcggcagaaatcaaacgcgcggatgatcattatcgatcctcgttacaccgacaccggcgccggtcgcgaagatgagtggattccgattcgtccaggtaccgatgcggcgctggtcaatggtctggcatatgtcttaatcaccgagaacatggtcgatcagccgttcctggataaatattgcgttggttatgacgaaaaaaccttgcctgccagcgcgccgaaaaacggtcactacaaagcctatattctgggccagggtaaagacggtatcgcgaagacgccggagtgggcggcgcaaattaccggtatcccggcggatcgcattattaagctggcgcgagaaatcggcagcgctaaacccgcctatatttgccagggatggggaccacaacgtcatgctaatggagaaatcgccacgcgcgccatctcgatgctggcgatcctgacgggtaatgttgggattaacggaggtaacagcggcgcgcgcgaagggtcttatgccctgccatttgaacgtatgcccacgttagaaaacccggttgaaaccagcatctccatgtttatgtggaccgatgccattgaacgcggcccggaaatgacggcgctgcgtgatggcgtgcgggggaaagataagctggacgtgccgattaaaatgatctggaactatgctggcaactgtttgattaaccagcactctgagattaaccgcacccacgaaatcctgcaggatgacaagaaatgcgaaatgatcgtcgttatcgactgtcatatgacctcgtcggcaaaatacgccgatattctgttgccggattgcactgcttctgagcagatggactttgcgctggatgcctcctgcgggaacatgtcttacgttatcttcactgaccaggcaattaaaccgcgcttcgagtgtaagacgatttatgagatgaccagcgaactggcgaaacgtcttggcgtggaacaacagtttaccgaaggacggacgcaagaagagtggatgcgtcatctgtacgaacagtcgcgtaaatccattccgaatctgcccacctttgaggagttccgtaagcaaggcatcttcaaacagcgcgaccccgaaggccaccatgtcgcctataaagacttccgcgaagatccgcaagcgaatccacttacaacgccatcgggcaagattgaaatctattcacaggcgttggcggatatcgccgctacctgggagctgccggaaggcgacgtgatcgatccattaccgatctacacgccaggttttgaaaactataacgatccgctaacggataaattcccgctgcagttgacgggtttccactataaagcgcgtgtgcattccacttatggcaacgtagacgtactgaaagccgcctgtcgccaggaaatgtggattaacccaatggatgcgcagaaacgcggtatcaacaatggcgataaagtccgcatcttcaacgatcgcggcgaagttcatatcgaggctaaagtgacgccgcgcatgatgccgggcgtggtcgctctgggagaaggcgcatggtatgacccggatgcaaaacgcgtggatcagggcggatgtattaacgtactgacgacccaacgtccttctccgctggcgaaggggaacccgtcacatacgaacctcgttcaggttgaaaaggcgtaaggagtaaccgatgacaacccagtatggattttttattgattccagccgttgcaccggttgcaaaacctgcgaactggcctgcaaggactacaaagatttgaccccggatgtcagcttccgtcgcatttatgagtatgcaggtggcgactggcaggaggataacggcgtctggcaccagaacgtctttgcctactatctctccatctcctgtaaccactgcgaagacccggcctgcaccaaagtctgcccgagcggcgcgatgcacaagcgcgatgacggttttgtggtggtgaacgaagaggtctgtatcggttgccgctactgccacatggcctgcccgtacggcgcgccgcagtacaacgcggccaaaggtcatatgaccaagtgcgatggctgttatgaccgggtggcggaaggtaagaaaccgatctgcgtcgaatcctgtccgctgcgggcgctggatttcggcccgatagacgaactgcgcaaaaaacacggtgagctggctgccgtcgcgccgttaccgcgcgcgcatttcacgaagccgaatattgtgattaaacccaacgccaacagccgcccgaccggggacactaccggttatctggccaatccgaaggaggtataagatgggaagtggatggcatgaatggccgttgatgatcttcacggtctttggtcagtgcgtggccggtggttttattgttctggctttggcgctgatgaagggcgacctgcgcgcggaaacgcagcagcgggtgatcgcctgtatgtttggtctgtgggtgctgatggggattggctttatcgcctcgatgctgcatctgggctcgccgatgcgcgcgtttaactcgcttaaccgcgtgggtgcttccgcactgagcaatgaaattgccagcggctcggtgttttttgcggtcggcgggattggctggctgctggcggtactgaaaaagctgccgccggcactgcgcacactctggctgattatcacgatggtactgggcgtcgtcttcgtctggatgatggtacgcgtctataacagcatcgatacagtaccgacctggtatagcgtctggacgccgctgggcttcttcctgacgctctttatagggggcccgctactgggttatctgctgctgcgcatcgcaggcgtgaacggttgggcgatgcgtttgttgcctgcggtgtcggtgctggcgctggtggttattgccattatggtggccatgcagggcgcggaactggcgacgattcacagttccattcagcaggcgtctgctctggtgccggattatggttcgctgatggcctggcgtatggtgctgcttgcggcggcgttgtgctgctggattgtgccacagttaaaagggtatcaacctgcggtaccgttgctctctgtcgccttcattctgatgctggcgggggaattgattggccgcggcgtattctatgggctgcatatgaccgtgggcatggcggtagccagctaacgcgttgacgcgcattcggcctgcagaacgtgcaggccgaattcgcctttagccgccatcaatctaaggaatataaccggggcggagaaggcgcatataaatccatagagaagaaaacgaagctaaaggaaccatgaaatttttcgactgaacaaaacgccgattttgcgggttagatcaataaaaacaaggggatgaatttttagcctttcaatatattcacgtgcagaataagtaaatcaaatcgatagtctcaaaacttgagaatcgcccatgcggagccgattgacaatgtttttggcgatggcatgatgcgcatgaaatttgaacttcctcacggtttttattcatgtccacctatacccgtcccgtcatgcttttgctgtgcgggctacttttgttgaccctggccattgcggtactgaatacgcttgtgccgctgtggcttgctcaggcaaaccttcctacctggcaggtggggatggtcagctcgtcttattttaccggcaatctggtcgggacgttatttaccgggtatttaattaaacgcattgggtttaaccgtagctattatcttgcctcgctgatcttcgccgcgggttgtgtcgggttgggggtgatggtggggttctggagctggatgagctggcgttttattgccggtatcggctgcgccatgatttgggtggttgtcgaaagtgcgttgatgtgcagcggaacctcgcataatcgcgggcgcctgctggctgcctatatgatggcctattacatggggaccttccttggacaattattggtcagtaaagtatctggtgaattgctgcacgtccttccctgggtgaccggaatgattctggcgggaattctgccgctactctttacccgaattgtaaatcagcaaacgcaggcacgtcattcctcttctattagcgccatgctgaagctacgccaggcgcgtcttggcgtgaatggttgtattatttccggcattgttcttggttcattatatggcctgatgccgttatatctgaagcatcaggggatggctaacgccagcatcggtttctggatggcggtgctggtgagcgccggcattttggggcaatggccaatgggacgtctggcggacaaatttggtcgcttgctggtgttacgcgtacaggtattcgttgtcatactcggtagtattgccatgttaacccaggcggcgatggcgccagctctgtttattctgggggcggcgggttttacgctttatcccgtcgcaatggcctgggcctgtgaaaaagtcgaacatcaccagcttgtggcaatgaaccaggcgctgttgttaagttatacggtagggagcctgttggggccgtcttttgctgcgatgttaatgcagaattattcagataatctgctgtttattatgatcgccagcgtatcgtttatttatctgctgatgctgttacgtaacgccggccagacgcctaatcctgtcgcccacatctgactgttctctgaattgtatgcaggacgtgagtcttgcatactatttgtttatgttttacgtaaaataattgacctgcataattttcttgctttgctgaaaaataaaatgtgccgaaggttataattttgcgctcctctattttctctcttcgtctttaccgcgcataatcccccgcttcatttatagtaatagcattgtgttcacgaaggatcgcgttatgccgaatgtgcaggaaaaacagttgcgatggtacaacatcgccctgatgtcgtttattaccgtttggggattcggcaatgttgtcaataactatgctaaccaggggttagtggttgtcttctcctgggtgtttatttttgcgctctatttcattccttatgccttaatcgtggggcaactgggctcaaccttcaaagagggaaaagggggcgtcagtacctggattaagcatacgatggggccggggttggcttaccttgcggcatggacctattgggtcgtgcatattccctacctggcgcaaaagccgcaggcgatactcattgcattgggatgggctttaaaaggcgacggctcgttgataaaagaatataccgtcgttgccttgcaggggctgacgctggcattgtttgttttctttatgtgggttgcttcccgggggatgaaatcgctaaaggttgttgggtctgtggccgggattgccatgtttatcatgtcaattttatatgttgtgatggcagtgaccgcgccagcaattacaaacgttgaaattgcgaccactaacatcacctggcagtcatttattcctcatatcgattttacctatatcaccaccatctctatgttggtctttgcggttggtggggcagagaagatctcgccttatgtcaaccagacgcggaatccaggaaaagaatttccgaaggggatgctctttttagccgtcatggttgcggtctgcgctatcctcggttcgttggcgatgggaatgatgtttgattcgcggcatatacctgacgatttaatgactaatgggcaatattatgcattccagaaattgggtgagtattaccatatgggtaattcattaatggtgatttatgccattgccaatactctggggcaaatcgccgcgctggtgttttctattgatgcgccactgaaagttttactgggtgatgcagacactaaatatatcccgcagcgcttatgtcgtactaacgcttcaggtacgcctgttaacggttatttgctgacattagtgttggtcgctatcttgattatgttgccaacgcttggcatcggcgatatgaacaacctgtacaaatggctgcttaatctcaattcagtcgttatgccgctgcgctatctgtgggtatttgtcgcctttattgccgtcattcgactggcgcaaaagtacaaacccgaatatgtgtttattcgcaaccgggcgttggcgttaactgtgggaatatggtgttttgccttcaccgcgtttgcctgccttaccggtattttccccaaaatggaggcgttcacgccggagtggacattccagctgacgttgaacatcgtgacgccttttgtcctggtcgggttgggattaattttcccactgctggcgcgtagaaacacataacgacgctcttttccacggcgctcctgtcaggcgagcgccttttaaggttacaggtgcctgggttccaggcggagaccacggtattaacaggcgccgggggcagcaatagttgtcagaccttcaacccagcagcagataagcgactctgtatttaatacctggttagcgcaatattgttaaccatgcctgtctgatggcggggtcgggtattttagcggtaagagcgttatccagacagcaaaacggctaccgtcatgggtagccgtttaaaagcgggtaagatagcaggcgattaatacatcactttatgaccatactgctcaagaataccctttacacgctccatggtctcttttttaggcggcttcacgccatccagtttatattcttcgcccattgccacccatttatgtttgcccagctcatgatagggcaacagttcgattttttcgacattacccatatcgcgggtaaactcgcccaggcgatgcgcggaatcatcgtcgtcagaccagccgggaacgacaacgtaacggatccagaccttcacatttttctttgataaatactgcgcgaattccagcgtccggtgattagagacaccgaccagattctggtggatctcatcattcatctgcttgagatcgagcatcaccagatcggtaacgtccaacagttcatcaatcaccgggtcataacggcgcacaaagccgttggtgtcgagacaggtgtggataccttcttttttacaggcgcgaaaccagtcgcgtacaaattctgcctgcaaaatggcctcgccgccggatgccgtcacgccgccgccagaagcattcataaaatgccgataggtcaccacctctttcattaagtcttcaacggtgatttctttaccgccatgcgtatcccatgtgtcgcggttatggcaatacaggcagcgcatcaggcagccctgaaaaaaggtaataaagcggatgcctgggccatcaacggtgccacaggactcaaaggagtgaatgcgaccaataaccggctttttatcagcagttactgcaacactttcatttgtaatacaattggttaagttactcatatcgcttcggctagctctaaataacatggggtttatggacacattccgggcatgttgagcaccctggtaagggggttgcatcctgtaaaaaagcggtactgcgagcgtaaattttggactacagaatgtgtggctgttccagaatgtgctgcaatggagctattttacctctattcagtataaaatatacggcaaatctatgctgcataactcgcaccgccagaaattctggctcattcatcagctcgtaacgcctcaaccgcaatacatactgtaagtgtatcatccatagcgtcctggttttgctgtttatgatccgcctcttttttcgaatggttggcgccgttttgttgtggtcagaacgaaaataattctcaacataattcagatgtgtccaaagaacgttatgcgctgtccagcgcctggcgtcgcattcaacgcgcaatcaggtgtaaatctgatgtcatttctaaacccaggctgattcaatctcttaaatagagtgtggttttaatcaaaaaatgagagcaacggattggatcttgctttcgcggtaaataatcaagggagttattatgccagttacgttaagttttggtaatcgtcataactatgaaattaatcattcacggctagcccgtttgatgagtcctgataaagaagaagcgctatacatgggggtatgggatagatttaaggactgcttcagaacacacaaaaaacaagaggtgctggaggtattatatacactcatccatggatgtgaacgtgaaaatcaagctgaacttaatgttgatataaccggcatggagaagatacatgcctttacacaattaaaacaatatgctaatccatctcaacaagaccgctttgttatgcgttttgatatgaatcagacacaagttttatttgagattgatggcaaggttattgataaatgtaatttgcatcgtctcctcaatgtttcagaaaactgtatttttaaagtgatggaagaagatgaagaagagttgttttttaaagtatgtattaagtatggagaaaaaattgcccgctatccagaattattagaaggatttgctaataaacttaaagatgcagttaatgaggatgatgacgttaaggatgaagtttataagcttatgcgatctggagaagatcgaaaaatggaatgtgttgaatggaatggtactcttactgaagaggagaagaataaactacgctgtcttcaaatggggtcttttaatattactacccaattttttaaaataggttactgggaattagagggggaagtcctgtttgatatggttcatccaacacttagctatctgctacaagcatataaaccgtcattgtcatctgatttaatagaaactaacacgatgctgttttctgatgtattaaataaggattatgatgattatcaaaataataaaagagaaattgatgctattctaagaagaatatatagatcacataataacactttatttataagtgaaaagtcgagttgtcgcaatatgcttatataaaaagtcattaaaaaggccccactgatatggagccttttttgtacgctttttatggcgtaatttcagtcaaacccattacatggtctgcgtgaaggtacgagtaataacgtcctgctgctgttctttcgtcagggagttaaaacgtactgcgtaaccagatacacggatggtcagctgcggatatttttccggatgttccatcgcgtccagcagcatttcacggttcatgacgttgacgttcaggtgctgaccgccttcgatggacgcttcgtggtggaagtaaccatccatcagacctgccaggttagtcttacgaacttcgtcgtctttacccagtgcgttcggaacgatagagaaggtataagaaataccatctttcgcgtaagcaaacggcagtttagcaacggaggtcagagaagcgacagcgcctttctggtcacgaccgtgcatcgggttagcacctggtccgaacggcgcgccagcgcgacgaccatccggggtgttaccggttttcttaccatacacaacgttagaagtgatggtcagaacagactgcgtcgggatagcgccacggtaggtggtcagtttctgaattttcttcatgaaacgttctaccaggtcaaccgccatgtcatctacacgagcgtcgttgttaccaaactgcgggtattcgccttcgatttcgaagtcgatagccagaccatcttcgtcacgaatcggtttaactttcgcatatttgatggcagacagggagtcagcagcaacggacagacctgcgataccacacgccatggtgcggataacgtcacggtcgtgcagcgccatcagagaggcttcgtagctgtacttgtcgtgcatgtagtggataacgttcagcgcggtgacatactgtttagccagccagtccatgaagtgatccatgcgatccatcacttcgtcgaagttcagaacatcgcctttgatcggttcggatttcggaccaacctgcattttcagtttttcatcaacgccgccgttgatagcgtacagcatggttttcgccaggtttgcacgcgcgccgaagaactgcatttgtttaccaacgatcatcgggcttacgcagcatgcgatagcgtagtcatcgttgttgaagtccggacgcatcaggtcatcgttctcgtactgcagagaagaggtgtcgatggagactttagcggcgaatttcttgaagttcagcggcagtttttcagaccacagaacggtgatgttcggctccggagacggccccatggtgtacagggtgttcaggaaacggaagctgtttttggtgaccagagtacggccatcaacgcccataccgccgatagattcggttgcccaaatcgggtcgccggagaacagttcatcatattcaggagtacgcaggaagcgaaccatacgcagtttcatgaccaggtggtcaatcatttcctgtgcgtcttgctcggtgattttgcctgctttcaggtcacgttcgatgtacgcatccaggaaggtggatacacgaccgaaggacattgctgcgccgttctgagatttaaccgcagccaggtaaccgaagtaagtccactggattgcttcctgagcgttagtcgccggaccagagatatcgcagccgtatttagctgccatttctttgatctgacccagagcgcggtgctgttcagcgatttcttcacgcagacggatagtcgcttccagatttacgccgttttccagatcggattgcagagacgtaaactgtgcgaatttgtctttcatcaggtagtcgataccgtacagcgctacgcgacggtagtcaccgatgatacggccacggccatacgcatccggcagaccggtcagaacgccggatttacggcaacgcaggatgtccggagtataaacgtcgaacacgccctggttgtgagtcttacggtattcggtgaagatttttttgatcattgggtccagctcgcgattgtacgctttgcaggaaccttcaaccattttgatgccgccgaacgggataatcgcacgcttcagcggagcttcagtctgcagaccaacaattttctcaagcgctttgttgatgtagccagcgtcgtgagaagtgatggtggaagcaacggaggtgtcaaagtcaacaggcgcgtgagtgcggttttcctgtttaacgccttccattacgctgtcccacagcttggtggtcgcgtcagtagcgccagccaggaaggactcgtcaccctcatacggagtgtagtttttctgaatgaagtcacggacgtttacttcattctgccagtcacctttggtaaaaccttcccaggctgtggctaacttttcattaagctcggacatgtaacacctaccttcttaagtggattttttatttactgcgtgtaatgggcatcaacagattaatgatgctcgttaccacgcaggtaaatgacccagtatgtcaacccgaccaacaaaccgccgccgataatattaccgatcgtgaccggaatcaggttatcagtgatgaagctcatcacggtcaggtgagaaaaactttccggagacgaaccaaccgcggtccaaaactccggtgtagcaaaatcgcgtattacaatacccataggaatcataaacatgtttgcgatactgtgctcaaaaccgctggcgacaaacatggcgacgggcagtaccatgatgaacgctttgtccatcaggctacgacctgagtagctcatccacacggccagacaaaccatcaggttcgccagaataccgaggcagacagcttcaataaaagtgtggtgcattttgtggtcggcggtttgcaggacgttaagtccccattgaccgttggcagtcatatactcgccggaaagccacatcagtaacacgaaaagcagagcgccaatcaggttaccaaaatagacgtttaaccagtttttagccagttgcccccaggtgatgcgaccgctagctttagctacaacgatcagaacagtagaggtgaagagatcagcgccgcaaataacacagagaatcagtcccaaagagaaacagatacccccgataagtttcgccatgccataaggcatcgcgccagtaccggttgtcgcagtaatataaaaaacaaaggcaattgaaatgaatacgccggcggtaatcgccagatagaaagtcttaagcggatgtttcgttgctttatagacgcctgcttcttcagccactttggccattgctgcagggagtaaaaggtcaaaagggttgtcagctttcacactaactctctctttattaagtcggcgacgagatactaacaaagcattatagatgagaatttgatatagatcatatctcgcctggcttataggcccgtaagtcgcatggcttttatgcaattacggtgtaactttttgattatcctaataaaaataaattttaaaaattataaatagagttgaattttttcctgactcctcctgctgcacggttaattaatatggagtaatcaacaaataaagtaacatcactatgtcaattaatttaatatcaacaaccaatatttaaccttgttattacatttttcgccgtttagcgaaaataaataaaacggggccgcaaaggcgccccgtaatataacgcagccgagagggtaaacctaccctaagtcactcatatggccttattttgaccagtatgccgctttcgcgcgctgtaatttatcatacgcttttaacaaggactgatgcgccgggaacgcttgtagatcgtggtcgacagccggtagtccataaaaagccgcttcaccgctaagcgcggcgctggcggcctctacagcctctgcgccatacatttttataaaagcattgagatattgcagtggctgacgcgcatcttcttgcgacaggagcagcagagtttgcaggcaacggtaatagtttgcgcgtgtcggactaaagaccgacgaattgaactccatcgtccattctgtccagattagcgcctgctccaaatcgccgcccgctaacgctaacattgcttttaattcgccgacgcgcagtgtataccaaccattgtccgctccggtcgccagacccaacagttcacgcacgcgggtgaaatcgtcaaaaccttcttcatccaattgttcaatcagattgagataatcttctttattccaggcgctaccgggcagcgaaagcagagtctcacgaagatggctacccatattgttgttggccagccacagatcttcggcaggataaatatcagacattcccggtacgataatacgacaggcgtatacgccgagatgctcgtaatcggcaatgtaaacttctttatcttcagcagcaaagatggccattagcgtggcgaattcttcttcggtagtgccggaaaaactccagtccgtgaacggataatcggcgtcctgtttgaacagatcccaggaaatcaggccgctggagtcgatgaagtgggtctccagattagtgtgctccgcgacttcttcatcatcgaacgttggtggcgtgaagacatcaagatctttcagaccgcgtccctggagtagctcggtcactgtacgctccagcgcaacgccaaagtcaggatgggcgccaaaagaagcaaagcaggtaccgttagccgggttgaacagcacgacgcagataaccggatacttaccgcccagcgagccgtcataggcgaaaatcgggaaaccctcggcttccagcgtggcgattgactccattaccgccggataacgcgccatcacctctgcgggaatctccggcagactgatactttccgcaatgatgcgatttttcacataacgctcgaagacttccgacagtccctgaacgcgggcttcattacgcgtattgccggcggacattccgttagagacgtacaggttgccgatgatattcatcggaatatacacggtctggttatcggactgacgggtaaatggcaggccgcagacgccgcgagcttcattgccggactgaagatcaattaactggcttccggtgagttcattttccggatcgtaaaacgcgcgcagacgggcatcaagcaagccttccggtacgtcgtcattttcagtcagcgggaaccacttttcgttcgggtaatgcacgaatggcccattggcgaccgtttcgccaagccagaaatcagcaaagaagtagttggttgacagacgctcgaagtattcgcccagcgccgaggccagcgccgcttttttggtcgcgccttttccgttggtaaagcataacgcgcactctttatcgcgaatatgcactgaccagacgtttggcaccgggttcagccaggaggcctcttcgatgtgaaagccgaggtcgagtaacttttgctggaagcgggcgatggagtcttccagcgcggcgtctttgccgggaataaatgtttgcgtcatgaaaatcacttttgtcgtacggaaagcgcgcaatgatacgggttttatgtgacgggcgctatctcgccgggacatcggcggaaataaaagtattggctatgcttttacactggcattcacaggaagagcataaaaaatgaaagcatttgatttgcaacgaatggcgctggataacgtgccggtagcgtttttgggggaagtggcgctgcgtagcttttacacctttgttctggtgtttcttttcttaaaggtgacaggacgacgcggcgtacggcaaatgtcgctttttgaagtgctgatcattttgacattgggatcggcggcaggcgacgtcgcgttttatgatgacgttccgatgctccctgttctggtggtattcatcaccctggcgctgctctatcgcctggtcatgtggctgatggcgcatagtgaaaagttggaagatctgctggaaggcaagtcggtggtcattgttgaagacggcgaactggcgtgggaaaaactgcagcgctcgaacatgacggagtttgagttttttatggagcttcgcttgaatggcgttgagcaactggggcaggtcagactggccatcctggagacaaacggacaaatcagcgtctatttctttgaaaataaagacgttaagccggggttaagcattcttcctgagcactgtacgccacgctttatcgtggcgccggaggctggcgactatgcctgcgtacgttgcagtgaagtgatacgcatgaatatcggggaaaagcaattatgtccgcgctgcgcaaatccagaatggacgaaggcaagccgggctaaacgcgttgtttaacagcgaaaatatcggatttatacggttaaaccggaagattctgttgtgtgacgcatgccgcattttctcctcgcattgttttacccattgcggcgcgtgtcactgaatgataaaaccgatattcacatgaataacgtttgcctgatgtctgtcaggcaggaaacaatgcagcgtggtgaggggaaatggctcaggtctttaattttagttcaggtccggcgatgctaccggcggaagtacttaaactggcgcaacaggaactgcgtgactggcacggtcttggtacgtcggtaatggaaattagccatcgaggcaaagagtttatccaggtcgctgaagaggcggagcaggattttcgcgatctccttaatatcccctccaactataaagttttattttgtcacggcggcggtcgcgggcagtttgctggcgtgccgctcaatctgctgggcgataaaaccacggcggattatgtcgatgctggttactgggcggcgagcgccatcaaagaagccaaaaaatactgtgcgccgcagattatcgacgccaaaatcaccgttgacggcaaacgtgccgtaaaaccgatgcgcgagtggcagctttccgataacgccgcttatttacactattgcccgaatgagaccattgacggcatcgccatcgatgaaacgccggattttggcccggaagtggtcgtcacggcggatttttcttctaccatcctgtctgcgccgctggacgtctctcgctatggcgtaatttatgctggcgcgcagaagaatatcggtccggcaggactgacgctggttatcgtccgggaggatctgttaggcaaggcgcatgagagctgcccgtccatcctcgactacaccgtcctgaatgataacgactcgatgtttaatacgccgccgactttcgcctggtatctttccggtctggtgttcaaatggttgaaagcgcagggcggcgtggcggcgatgcacaaaatcaatcagcaaaaagcggagttgctgtacggtgtgattgataacagcgatttctaccgtaacgatgtcgcacaggccaaccgttcgcggatgaatgttccgttccagttagcggacaatgcgctggacaaggtctttctggaagagtctttcgccgccggtctgcacgccttaaaagggcaccgtgttgttggcgggatgcgcgcctctatctataacgccatgccgattgaaggggtaaaagcgctaaccgatttcatgatcgattttgagcgtcgccacggctaattcgtttcttttttcatccccacggccagtctgtggggtttttatttctgttttttgagagttgagtttcatggaatccctgacgttacaacccatcgcgcgggtcgatggcgccattaatttacctggctccaaaagtgtttcaaaccgtgctttgctcctggcggctttagcttgtggtaaaaccgttctgacgaatctgctggatagcgatgacgtccgccatatgctcaatgccctgagcgcgttggggatcaattacaccctttctgccgatcgcacccgctgtgatatcacgggtaatggcggcccattacgtgcgccaggcgctctggaactgtttctcggtaatgccggaaccgcgatgcgtccgttagcggcagcgctatgtctggggcaaaatgagatagtgttaaccggcgaaccgcgtatgaaagagcgtccgataggccatctggttgattcgctgcgtcagggcggggcgaatattgattacctggagcaggaaaattatccgcccctgcgtctgcgcggcggttttatcggcggcgacattgaggttgatggtagcgtttccagccagttcctgaccgctctgctgatgacggcgccgctggcccctaaagacacaattattcgcgttaaaggcgaactggtatcaaaaccttacatcgatatcacgctaaatttaatgaaaacctttggcgtggagatagcgaaccaccactaccaacaatttgtcgtgaagggaggtcaacagtatcactctccaggtcgctatctggtcgagggcgatgcctcgtcagcgtcctattttctcgccgccggggcgataaaaggcggcacggtaaaagtgaccggaattggccgcaaaagtatgcagggcgatattcgttttgccgatgtgctggagaaaatgggcgcgaccattacctggggcgatgattttattgcctgcacgcgcggtgaattgcacgccatagatatggatatgaaccatattccggatgcggcgatgacgattgccaccacggcgctgtttgcgaaaggaaccacgacgttgcgcaatatttataactggcgagtgaaagaaaccgatcgcctgttcgcgatggcgaccgagctacgtaaagtgggcgctgaagtcgaagaagggcacgactatattcgtatcacgccgccggcgaagctccaacacgcggatattggcacgtacaacgaccaccgtatggcgatgtgcttctcactggtcgcactgtccgatacgccagttacgatcctggaccctaaatgtaccgcaaaaacgttccctgattatttcgaacaactggcgcgaatgagtacgcctgcctaagtcttctgttgcgccagtcgacgggctggcgcgccgagtccgtattcgcactatttttataattatgactaatgctaatttgttgatgatttaacacattgatttatgtgttttttataatagttatcaacggaagattagtatgaaaaataaatcattactactggcggtggcgatttccgccacgctactggcaggatgtaaaaatggcgtgaatggcaatttaatcgccagttcaggcatgtcagcctacaaagccgccacactgtccgatgcggatgttaaggcattatctaataatgcctgtaaacaaatggacagcgagaatcaactggcaggttcgaaaagcaaatacaccaaacgtctgagcaaaatcgccaaagcgctgggtaacaacattgacggtacgccggttagctataaagtctatatgaccagcgatatcaacgcatgggcgatggcgaacggttgcgttcgcgtatactccggcctgatggatctgatgaccgataatgaaattgaaggcgtactgggccatgaactgggccatgtctctttagggcactctcgcaaggcaatgcagaccgcttatgccacgctggcggctcgcgatgcgatttccgccaccagcggcgtcgcagcgcagctttcccagtctcaattgggcgatctggcggaaggcgtcatcaattcggcgttttctcgcagtcaggagtcggatgcggatgacttctcttacgatctgctgaaaaaacgcgggattaacacccagggcttagtcacggcattcgataaattcgccacaatggacgcaggtcatgcaaaatcattgatggactcccacccggcttcagccgatcgcgcgcagcatatgcgcgacagaattgccgaagataaaaagtaaattattgtcatctttcgggctggtttctcgccggcccgctataattgcgcaattattccgcatctgattacagacaaaactggtttttgcacgcaacgttaacggtcgcgagcgttggcgcgtataatgcgcggcgtttacgttaacggtacgcctgtttaaggagataaagatgacggcaattgccccggtaataaccattgatggcccaagcggtgcaggtaaaggcaccttgtgcaaagcaatggcggaagcattgcaatggcatctgctggattccggcgcgatataccgcgtactggcgctggcggcattgcatcaccatgtcgatctcgcctctgaagatgcgctggtgcctctggcgtcccatctggacgtgcgtttcgtctcaacggacggcaacctggaagttatcctggaaggcgaggacgttagcggcgaaatccgtacgcaggaagtcgcgaacgcggcatcccaggtggcagcattcccacgcgtgcgtgaagcgcttcttcgccgccaacgcgcattccgcgaagcgcctggtttaatcgccgatggacgcgatatggggaccgtggtcttcccggatgcgccggtaaaaattttccttgacgcctcctcggaggaacgtgcgcatcgacgtatgctacagttgcaggagaatggctttagtgttaactttgaacgccttttggccgagatcaaggaacgcgacgatcgcgatcgtaatcgcgctgtagcgccgttagttcctgctgctgatgcattagttttggattctacccgattaagcattgagcaagtgattgaaaaagcgttacaatatgcgcgccaaaaattggctctcgcttaaatgcgaccgaatttgtagtacccccgttgcaaaggattgacagcgggtatgttaaacaaccccatccggcacggagccaggtggacgttaaatatgaaacctgaagattaaacatgactgaatcttttgctcaactctttgaagaatccttaaaagaaatcgaaacccgcccgggttccatcgttcgtggtgttgttgttgctatcgacaaagacgtagtactggttgacgccggtctgaaatctgagtctgccattccggctgagcagttcaaaaacgcccagggcgaactggaaatccaggttggtgacgaagttgacgttgctctggatgcagtagaagacggcttcggtgaaactctgctctctcgtgagaaagctaaacgtcacgaagcatggatcacgctggaaaaagcttacgaagatgctgaaactgttaccggtgttatcaacggcaaagttaagggtggcttcactgttgagctgaacggtattcgcgcgttcctgccaggttctctggtagacgttcgtccggtgcgtgacactctgcacctggaaggcaaagagcttgaattcaaagtaatcaagctggaccagaaacgtaacaacgttgtggtttctcgtcgtgccgttatcgaatccgaaaacagcgcagaacgcgatcagctgctggaaaacctgcaggaaggcatggaagttaaaggtatcgttaagaacctcactgactacggtgcattcgttgatctgggcggcgttgacggcctgctgcacatcactgatatggcctggaaacgcgttaagcatccgagcgaaatcgtgaacgttggcgacgaaatcaacgtgaaagtgctgaaattcgaccgcgagcgtacccgtgtatccctgggcctgaaacagctgggcgaagatccgtgggttgctatcgctaaacgttatccggaaggtaccaaactgaccggtcgcgtgaccaacctgaccgactacggctgcttcgttgaaatcgaagaaggcgttgaaggcctggttcacgtttccgaaatggactggaccaacaaaaacatccacccgtccaaagtggttaacgttggcgacgtagtggaagtgatggttctggatatcgacgaagaacgtcgtcgtatctccctgggtctgaagcagtgcaaatctaacccgtggcagcagttcgcagaaacccacaacaagggcgaccgcgttgaaggtaaaatcaagtctatcactgacttcggtatcttcatcggcctggacggcggcatcgacggcctggttcacctgtctgacatctcctggaacgttgcaggcgaagaagcagttcgtgaatacaaaaaaggcgacgaaatcgctgcagttgttctgcaggttgacgcagaacgtgaacgtatctccctgggcgttaaacagctcgcagaagatccgttcaacaactgggttgctctgaacaagaaaggcgctatcgtaaccggtaaagtcactgcagttgacgcgaaaggcgcaaccgtagaactggctgacggcgttgaaggttacctgcgtgcttctgaagcatcccgtgaccgcgttgaagatgcgactctggttctgagcgttggcgacgacgttgaagctaaattcaccggcgttgatcgtaaaaaccgcgcaatcagcctgtctgttcgtgcgaaagacgaagctgacgagaaagatgccatcgcaactgttaacaaacaggaagatgcaaacttctctaacaacgcaatggctgaagcattcaaagcagctaaaggcgagtaatcctctgaaacttcgggtcttttagtccgaagtataacgagattacttgacagattgcaggtttcggcctgtaatcaagcactaagggcggctacggccgcccttaatcaatctcacggctgcagccaatttgcctttaaggaaccggaggaattatgaccaagtcagaattgattgaaagacttgcaacccagcaatctcacattcccgctaaggcggttgaagacgcggtaaaagagatgctggagcatatggcctcgactcttgcgcagggcgagcgtattgaaatccgcggtttcggcagtttttctttgcattaccgcgcgcctcgtaccggacgtaaccccaagaccggcgataaagtggaactggaaggaaaatacgttcctcactttaaaccgggtaaagaactgcgcgatcgcgccaatatttacggttaagttttaacgcaaaacttgaacccgaaaaaagcaccgtcagggtgcttttttcatttatacgccgtcaggcgcaaacgctattcgaccgaaaactggaaaacgtttcgcattttttgctgcgtcttacatttatcaggtaaaaaacctggaatccgcgccgtatagcacaaaatcccctccagacaatggcgtcctgaacctgcacactttcccgcacagggaggtgtctatgaagataacgacggtcagcgtatgcgtagtatgcggcatacttccgctcatgatattgccagtattacctgatacgtggattctcgcggtgctgttttgtctggcatgtttgctttgcctcataccccatcactatgcgcgctacgcggcattaaccttgctctttttcatgtgggggatatttgccgccaggcaggccatctgggcgggaaacgtcctgcccgctgcgacgcaggaggcgacagtcgtcattactgccaccgatcatatgaccactcattatgggcgaattacccatttgcatggaaagccactctttcctgctgtagggattgtcctgcatggccagtacttacccacggaagtgtgtgccggacagcagtgggcgatgacgctgaaggtcagagcggtacacggacagcttaacgaaggcggttttgatagccagcgttacgcgctggcgcagcaccaaccgttgaccgggcgttttctacaggctaaagcgattaaccctgagtgtagcttgcgtgggcgctatcttgcttcgcttcgcgctacgcttgcgccttatccgtggcagcaggttattctggcgttgggaatgggggagcggggagcggtgtcgcaggaggtgaaggccgttatgcgcgatacggggactgcccatttgatggcgatttccggcctgcatatcgcttttgctgcgttattggctgccggattaatccgtggcggacaattctttttgccggtcagatggattcgttggcagacgccattgctgggcggcattctttgcgcgatatgttatgcctggcttaccggcttacaaccgcctgcgctgcgcacggtggcggcgctgagcgtctggggaggattaaaattaagcggacgacagtggagcggctggcaagtctggtgctgctgtctggccgcgattattttcgccgatcctgtggcggttatatcacaaagtctttggctgtcagcatttgcggttgccggcctgttattctggtatcagtggtttcctgcgccaaacggaaattttccacggggcttacgttggttgcttaacctgcttcacctacaggcaggcattacacttctgcttttgcctctccaggtggcgctttttcatggcataagcgttaccgcaatgctggcgaatctttttgccgtaccctgggtcacatttgtgacggttccgctcatcctggcgggaatgattctgcatttaaccgggccgttttttcttgaagagtgggtatggtacctgaccgatcgcgcgttagccgcgctattttacctgttgaatgctttaccgcagggctgggtcaatattgataaccgttggcagtggctgacgcttttaccctggctaacgcttatcgcgtggcgattaaacgtctggcgtacctgtccggcggtctgtttatgcgggttattgttgatgagctggccactctggcggccgataaacgccagcggatggcaggtgcatatgctggatgtcggtcaggggctggcgatagcgatcgtcaggggcgataaagtaatactctacgataccggtcgggcatggccggagggcgacagcgggcaacaggttattattccctggttgcgctggcataatctgacgccggagggcgttattttgagtcatgagcatctggatcatcggggcgggctgcgttcgctacagcaggtctggccgtcaatgtggattcgcagcccgttaggctggcagggacatttgccctgttttcgcggtgagcagtggcaatggcaggggctaacgtttcaggcgcactggccgttacgcgaaagtgccgatcgaggaaataaccgctcctgtgtggtcaaagtggatgacggcgtacatagcatcctgctcacgggcgatattgaagcgggcgctgaacaaaaaatgctaagtcgttactggcgacatcttgcggcgacgtttatccaggtgccgcatcatggtagtaatacgtcgtcgtcgctaccatttattcagcgcgtacatggtgaagcggcgctggcgtccgcatcgcgctataacgcatggcggctgccgtcccgcaaggtaaaacagcgctaccgacagcaggcgtatcagtggtttgatacaccccaccaggggcaaatttcgctgctgttttctccgcagggctggcgcatacaaggcttacgggatcaaattttacctcgctggtatcatcagtggtttggcgtgtccgaggataacgggtagaatatgcggctatttcaacaaatgctggttttttgaatgcataacgataaagatctctctacgtggcagaccttccgccgactgtggccaaccatagcgccttttaaagcaggtctgatcgtggcgggcatagcgttaattctcaacgcagccagcgataccttcatgctatcgctcctcaagccattactggatgatggtttcggtaaaacggatcgctcagtgttgctgtggatgccgctggtggttattgggctgatgatattacgaggcatcactagctatatctccagctactgtatttcatgggtgtcaggcaaggtggtaatgaccatgcgccgtcgcctgtttggccatatgatgggaatgcccgtcgccttctttgataaacagtctaccggtacgctgctgtcgcgtattacttacgattcagaacaggttgcctcttcttcatctggcgcactgattaccgtggtgcgtgaaggggcatcgatcatcggattgtttatcatgatgttctattacagctggcagttgtcgatcatcctggttgttttagcaccgattgtgtcgattgcgattcgcgttgtctcaaagcggttccgcagcatcagtaaaaatatgcagaacacgatgggacaagtgactaccagcgctgaacaaatgctgaaaggacacaaagaggtactgatttttggcggtcaggaagtcgaaactaaacgctttgataaagtcagcaataagatgcgactgcaaggcatgaaaatggtctctgcctcgtcaatttccgatcctatcattcagctcattgcctcgctggcgctggcgtttgtcctctatgctgcgagcttcccaagcgtaatggatagcctgacggcagggaccatcaccgtggtgttctcctccatgatcgcgctgatgcgtccattaaaatcgctgacaaacgttaacgcgcagttccagcgtgggatggcggcttgtcaaacgttgtttgcgattctggatagcgaacaggagaaagatgaaggtaaacgtgtcattgaccgcgcgaccggcgatctcgaattccgcaatgtgacgtttacttacccgggccgtgaagtgccggcattgcgtaacatcaatttgaaaattcctgccgggaaaaccgtggcgctggtggggcgttccggatcgggtaaatcaactatcgccagtctgatcacccgtttctacgatattgatgaagggcacatcctgatggatggtcacgatctacgcgaatacactctggcctctctacgtaatcaggtggcgctggtttcgcaaaacgtgcatctgtttaacgacacggtcgccaataacattgcttatgcccggacggaagaatacagccgcgagcagattgaagaggcggcgcgcatggcctatgccatggactttatcaataagatggataatggcctggataccatcatcggcgaaaacggcgtactgctttccggcggtcagcgccagcgtatcgcgatcgcccgcgccttactgcgcgacagcccgattctgatccttgatgaagctacgtccgcgctggataccgaatctgaacgtgcgattcaggcagcgttggatgagctgcagaaaaaccgtacctctctggtgattgcgcaccgtctctccaccatcgaacaggcggatgagatcgttgtagtcgaagacggtattatcgttgagcgcggcactcatagcgagctgctggcgcaacacggcgtttacgcccagctacataagatgcaatttggccaatgattgcgcgtatctggtcgggtgaatccccgctatggcggttactgctgccgctctcctggctgtatggcctggtgagcggggcgattcgtctgagctataagcttggttttaaacgcgcctggcgagcgccggtaccggtggttgtggtagggaatcttacggctggcggtaacggtaaaacccccgtagtcatttggctggtggaaaagctgcaacagcgtggcgtgcgcgtgggggtcgtttcccgcggctacggcgggaaagctgccgcttatccgctgctcctgacgcctgagacgacaaccgcagaagcgggagatgaaccggtattgatttatcagcggaccggcgcgcctgtcgcggtggcgcctgaacgcgccgcggcggtgaaagcgattctggcggcgcataatctgcagattattatcaccgacgatgggttgcagcattaccgactcgcgcgagatattgaaattgtggtgattgacggggtgcgccgttttggcaacggctggtggcttcctgccggccctatgcgcgaacgcgccagtcgcctgaaaaccgtggacgccgctatcgtcaatggcggcgtcgcccgggcaggcgaaatacccatgcagctagcgcctggactggcggtgaacttacgtacgggagcgcgttgcgatgtagcgcagctgagcaatattgtggcgatggcgggcatcggtcatccgccgcgctttttcgccacgctggaagcctgtggcgcgcatccgcaaaagtgtgtcccgctggcggatcatcaaacgctcgcccctgctgacgttcaggcgttggtcggtgaaggacagaccctggtaatgacggaaaaagacgcggtgaaatgccgtgcttttgccgaagataactggtggttcttaccggttgatgcgcgtttgtccggtgagcagcctgataagttgcttgaacatatcacctcgctggttcgctagcgtcccccaatgcagcggcagtgatgaatttatggagtcatgaatgtcattgccgtacctttctctttcccaggcccggtgtcttcaccttgctgcgcaggggctattgaaaaagccacgccgtaacgtgctgcctggcgatgttcttgccgccatctcacgcatggcgttgctgcaaattgataccatcaatgttgtcgcacgtagcccctatctggtgctgtttagccgtctcggttcgtacccgcaggcctggctggatgaggcgctgcgacgcggcgagttaatggaatactgggcgcatgaggcctgtttcttaccacgccgcgactttaaacttatccgccatcgtatgctgtcgccggaaaagatgggctggaaatatcgcgcggcatggatgcatgagcacgcggaagaaatagaacagctagtgcggcatattcaggagcacggtccggtgcgttctgccgattttgaacatgcgcggaaaggcgtcagcggctggtgggaatggaaaccacataaacgccaccttgagggtttatttaccgccggaaaagtcatggttgttgagcggcgtaattttcaacgtgtatatgatttaacgccccgtgtgatgccgcactgggatgatgaacgcgatggactgtcacagtcgcaggcggaaaacctgatgctggataatagcgcgcgcagtctggggattttccgtgaacagtggctggcggattactaccgcctgaaacgtcctgacctgaagggatggcgggagagccgggcggaacagcagcagattattccggtcgaggtggaaacgttggggcggatgtggcttcatgccgatcttctttcgcagctggaaccagcgctgaataacgccttaaaggcgacccatagcgcagtgctgtcgcctttcgatcctgtggtatgggatcgcaagcgggcagcgcagctcttcggatttaactatcggctggaatgttatacgcctgcggcgaagcgccagtacggttattttgtgctgccgctattataccagggccgtttagtcgggcgaatggatgccaaaatgcaccgtaaaacgggggtgcttgagattatctcgctgtatctggaggacgatattcgccctggcgttagtctgcaaaaaggaatctggcaggcgattagcgcgtttgctgcctggcaacgggcatcgcgcgtgacgctgggacaatgtccgccaggcctgtttagcgccatgcgtcatggctgggaaatagaccctgcaccataaccgattatgttaatattgaaggattcacaatccggtccatctggaggaactatggatcatcgtctgcttgaaatcatcgcctgcccggtatgtaacggcaaactctggtataaccaggaacagcaagaattaatttgcaaactggataatctcgctttcccgttacgcgacggcattcctgtattgctggaaaatgaagctcgcgccctgacatctgatgagagtaaatcatgagtttcgtcgtcatcattccggcccgtttttcatctacccgactgccaggaaaaccattagtggatattaatggtaagcccatgattgttcatgtcctggagcgggcgcgcgaatctggcgcggaacgcattattgttgccaccgatcatgaagacgtggctcgtgcggtagaagcggctggcggcgaagtgtgcatgacgcgcgccgatcaccagtccggcaccgaacggttggcggaagtggtagagaagtgcggattcagcgacgataccgttattgtgaacgttcagggcgatgagccgatgatcccggcggttattattcgccaggtcgcggaaaatctggcgcagcgccaggttggcatggcgacgttggcggtgccgattcacagcgccgaagaagcgtttaacccgaatgcggtaaaagtcgtgctggatgctgaaggctatgcgctttacttttcccgggcgacgattccctgggatcgcgaccgctttgcaaaaagtctggaaacggtaggagatacttgccttcgtcacctgggcatttatggctatcgcgcgggttttatccgccgttacgtgagctggcaacccagccagctggaacatattgaaatgctggagcaactccgtgtgctgtggtacggcgaaaaaattcatgtcgccgtcgccaaagcggtgcccggcacgggcgtagacaccgccgacgacctggagcgcgtgcgcgctgaaatgcgttaacatgatcctgttcatgatcgtcttagacggtcatgaacagcgcggtatgatagcgcaaagatgaatactcacgtctgctcactagtggcagctttctcgtaccgttacgattttcctcatttttcttttcttcccttgatctgatacgggtgacatctgtccatacgacgctcattattaaagcagtagcactaatgggggtaatctggaatggaacagttgcgggccgaactcagtcatttgttgggtgaaaaacttagccgtatagagtgcgtgaatgagaaagcggattccgcattgtggtcattatatgacagccagggcatcccgatgccgctgatggcgcgaagttttaccactcccggcgttgcgcagcaactggcctggaaaacctcaatgctggcgcgtagcggtacggtgaggatgccggtaatctatggcgtattgacgcatgaagagcatcctggtccggatgtgctgctgctggaacgactgcgcggtgtaccggtagaggcgccggcgcgcactccggaacgctgggaacagctaaaagatcagattgtcgaagggctgttagcctggcatcggcaggatagccgcggttgcgttggcgccgtagaccatactcaggagaatatctggccttcctggtatcgtcagcgggtggaggtgctgtggacgacgctaaatcagttcagcaataccggcctgacgatgcaggacagacgcattctgtttcgtaccagagaatgtcttccttcgttatttgaagggtttaacgacaactgcgtactggtgcatggcaacttctgcctgcgcagtatgcttaaagacgcccgtagcgatcagcttctggcgatggtcggccccgggctgatgctgtgggcgccgagagagttcgaactgtttcgcctgatggataatccattggcggagggattgctttggcattatctgcaacgcgcgccagtggcggagtccttcatctggcggcgttggctctatgtgctgtgggacgaggttgcgcaattggtcaataccggacgttttaaccgtaccaattttgatctggcggcgaaatcattactcccctggcttgcctgatatgcctttcagccattgccaaagtcgccctaatgtttcatacccagcgcgatcgctgtgcatcagccagaccggggacggaattgcccgctcccagggattgagcggcgaatcgatcgccaactgattcgccggcgcgggaagcggattcagcccggcatgctgaaagaaaatcatcgcacgcggcaaatgcgaggcggaggttaccaacaggaaaggggcgtcgccgatggcctgcttaacggcggcggcttcttcttccgtatcttttggcttatccagcgtaataatatcgctacgcggtacgcccagcgactgcgccacccgcgcaccgacttccgccgtgcttaccgtattggtttttgctatgccgccggtaaaaatcagcctggctcccggattcgcgcgccacagccgaatgccttccgccagccgcggcaagctgttgttaattaaattagagctcggcgcccactgcgggttccaggtatagccgccgccgagaaccacaatatattccaccttttgcggaccctgccaggtagggtagcggttttctatcggacgcagcaaatggtcagagacgggttgcaggcttaatagcaatagcgccagccaacctacgctgataaatacttttccggtcttctgaaagcggctaaaccagagcagcgccaggccgacgccaatgatcagcaacatcagcggaagcggcaataacataccgccaatcactttctttagcgtaaaaagcatcctttttggttccttttttaaccatatagcggaggattaacggtgatattacaccagacaggttcattctggccgcggctgtgacaaaatagcggttttatcagataacgcctgagccagcctgtggagagtccgatgcaggatcgcaattttgatgacattgctgaaaagttttcccgtaacatttacggcacgaccaaaggacaactgcggcaagccattctgtggcaagacctggatcgcgtgctggaggagattggcgggcggaaactgcgggtgctggatgccggcggcggcgaagggcaaacggcgattaagatggcggaacgcggccatcaggtgacgttatgcgatctgtctggcgaaatgatcgcccgcgcgcggcaggcggccgaggcaaaaggtgtgagcaaagacatgcattttatacaatgcccggctcaggacgtcgcttcgcatttggaaagcccggttgatctgatattgtttcatgctgtgctggagtgggtagccgatcctgtcggcgtattagaaacgctctggtcagtattgcgccctggcggcgcgctgtcgttgatgttctataacgctaacggtttgctgatgcacaatatggtggcgggtaattttgactacgtgcaggcggggatgcctaaacgcaagaagcgcacgctgtcgcctgactacccgcgcgaccccgcgcaggtgtaccagtggctggaggcgattggttggcagattaccggtaaaaccggcgtgcgtgtgtttcatgattatctgcgtgaaaaacaccagcagcgtgactgttatgagaccctggtcgaactggaaacgcgttattgccgccaggagccgtatattagccttgggcgctacattcatgtcaccgcgattaaaagcccggcgctagccgcagatgcaaggataacctatgagtgaattttcccagacagtccccgaactggttgcctgggccagaaaaaacgacttttccatctcgctgccggtagacagactttcctttctgctggcggtcgccacgttgaacggcgaacgccttgacggcgagatgagtgaaggcgagctggtggatgcattccgccatgtgagtgatgcgtttgagcaaaccagcgaaaccatcggcgtgcgcgcgaacaacgcgattaacgatatggtgcgtcaacgtctgctgaaccgctttaccagcgagcaggcggaaggcaatgcgatttaccgattaaccccgctcgggattggcatcaccgattactacattcgtcaacgcgaattctctacgctgcgtctttctatgcagttgtcgattgtggccggcgaattgaagcgcgcggcggatgcggcagcggaggggggcgatgagttccactggcatcgcaacgtttacgcgccattgaaatattcggtggcggagattttcgacagtatcgatctcacccagcgcatcatggatgaacagcagcagcaggtgaaagacgatatcgcacaactgctgaataaagactggcgggcggcgatttccagctgtgagctgctgctttccgaaacgtccggtacgctgcgcgagttgcaggatacgctggaggcggcgggcgataagctgcaggctaacctgctgcgcattcaggatgccacgatgacgcacgacgatctgcattttgtcgacaggctggtgtttgacttacaaagtaaactcgaccgcattatcagttggggtcagcagtctattgatttatggatcggctacgatcgtcacgtgcataaatttatccgtaccgcgatcgatatggataaaaaccgtgtcttcgcccagcggttgcgccagtccgtgcagacttattttgacgatccctgggcgctaacctacgcgaatgccgatcgtctgctggatatgcgcgatgaagagatggcgttgcgtgacgatgaagtcaccggggagttgccgccggatctggaatatgaagagtttaacgagatccgcgagcagttagcggccatcattgaagaacagctggctatctacaaaaccagacaaacgccactggatcttgggctggtggtgcgcgagtatctggcgcaatacccgcgcgcgcgtcatttcgacgtggcgcgtattgttatcgatcaagcggtacgtcttggcgtagcgcaagcagatttcaccggactgccagccaaatggcagccgattaatgattacggagccaaggtacaggcgcatgtcattgacaaatattgaacaagtgatgccggttaagctggcgcaggcgctggcgaatccgttatttccggcgctggatagcgcattacgttcgggccgccacatcgggctggacgaactggataatcatgcctttctgatggattttcaggaatacctggaagagttttacgcgcgttataacgtggaactgattcgcgcgccggaggggttcttctacctgcgtccgcgttctaccacgcttatcccgcgctcggtgttatccgaactggatatgatggtcggtaaaattctctgctacctctatcttagcccggagcgtctggccaacgaagggatctttactcagcaagaattgtacgacgagctgcttacccttgcggacgaagccaaactgctaaagctggttaataaccgctcgacgggatctgacgttgatcgtcagaaactgcaggaaaaggtgcgttcttctttaaaccgcctgcgtcgtttgggcatggtatggtttatgggccacgacagcagcaaattccgcattaccgaatcggtcttccgctttggcgcggatgtccgcgccggcgacgatcctcgcgaggcgcagcgtcgtctcatccgcgacggggaagcgatgcccattgaaaaccatctgcaacttaatgatgagaccgaagagagtcagccggacagtggagaggaagaataatgattgaacgcggtaaatttcgctcgctaacgctgattaactggaacggtttttttgcccgtacttttgacctggatgaactggtcacgacgttatccgggggcaacggtgccgggaaatccacgacgatggcggcgttcgtcacggcgctgatcccggatcttacattactgcactttcgtaacaccacggaagccggcgccaccagcggttcgcgcgataaaggtctgcacggtaagctgaaggcgggcgtctgttactccatgctcgacaccattaattcccgccatcagcgggtggtggtcggcgtgcgtctgcagcaggtcgctgggcgcgatcgcaaagtggacatcaaaccgttcgctatccaggggctgccgatgtcggtacagccgacacaactggtgacggagacattaaacgaacgtcaggcgcgcgtactgtcgcttgctgagctgaaagacaagcttgacgagatggaaggcgtgcagtttaagcagtttaactccatcaccgattatcattcgctgatgtttgacttagggattatcgcccgtcgtctgcgctccgcttccgatcgtagtaaattctatcgtttgatagaggcctcgctgtacggcgggatctccagcgccattacccgatcgctacgcgattatttattgccggaaaacagcggcgtgcgcaaggcgttccaggatatggaagcggcgctgcgcgagaaccgactcacgctggaagcgattcgtgttacccaatccgatcgcgatctgtttaagcatttgatcagcgaagccaccgattatgtggcggcggattatatgcgccacgccaatgagcgtcgggttcaccttgatcaggcgttggcgtttcgacgcgaactgtacacatcgcgcaaacaactggcggctgagcagtacaagcacgtcgatatggcccgtgagttgggcgaacataacggcgccgaaggttctcttgaggcggattaccaggcggcgagcgatcacctgaatctggtgcaaaccgcgctgcgtcagcaggaaaaaattgaacgctacgaagcggatcttgaagagctgcagattcgactcgaagagcaaaacgaagtggtggcggaagccgccgaaatgcaggacgaaaatgaagcgcgtgccgaagccgccgagctggaagtcgatgaactcaaaagccagcttgcggattaccagcaggcgctggatgtacagcaaacgcgcgcgattcagtataaccaggcgatatcagcgcttgcccgcgctaaagaactttgtcatctgccggatctaacgccggaaagcgccgccgaatggctggatactttccaggcaaaagagcaggaagctacggaaaaactgctgtcgttggaacaaaaaatgagcgtggcgcaaaccgcgcacagccagtttgagcaggcttaccagctagtagcggcgatcaacggcccgctggcgcgtagcgaagcctgggacgtggcgcgcgagctgttacgggacggcgtgaaccagcgtcatctggcggaacaggtacagccgctgcggatgcgcctgagcgaactggaacagcggctgcgcgagcagcaagaggcggaacgtctgctggctgagttctgtaagcgacagggcaaaaattttgatattgacgaactggaagcgctgcatcaggagctggaagcccgcatcgcgtccttgtctgagagcgtgtcgtcagccagcgaacagcgtatggccttgcgtcaggaacaggaacagctgcaatcccgtatccagcatctgatgcaacgcgctcctgtctggctggcggcgcagaatagcctgaaccagcttagcgaacagtgcggcgaggagtttacgtccagccaggaagtgaccgaatacctgcaacagctactggagcgtgagcgcgaagccattgtcgaacgcgacgaagtgggcgcgcgtaaaaatgcggttgatgaagagatcgaacgtttaagccagccgggcggcgcggaagatcagcgtttgaatgcgctggcggagcgttttggcggggtactgctgtcggaaatctacgatgatgtcagtcttgaagatgcgccgtacttttccgcactgtatggcccgtcgcgccatgcgatcgtcgtaccggatttatcgcaaatagccgaacagcttgaaggtctgaccgactgcccggaagatctgtacctgatcgaaggcgatccgcagtcttttgatgacagcgtattcagcgttgacgagctggaaaaggcggtggtcgtgaaaattgccgaccgtcagtggcgttattcgcgttttccgtcgctgcctatttttggccgtgcggcgcgcgagaaccgtattgaaagtctccatgcggaacgggaagtgctttccgagcgctttgccacgctctcgtttgacgtgcagaaaacccagcgtttgcaccaggcgttcagccgttttatcggtagccacctttctgttgcctttgaggacgatccggaagcggaaattcgccgactgaacgggcgtcgcgtcgagctggagcgcgcgctggcgacgcatgaaagcgacaaccagcagcagcgccttcagtttgagcaggccaaagagggcgtttccgcgcttaaccgtttgctgccgcggctgaatttattggccgatgaaacgctggccgatcgggtcgatgaaattcaggaacggttggatgaggcgcaagaagcggcgcgatttgtgcagcaatatggcaaccagttagccaaactggagccggtggtttccgttctgcaaagcgatccggaacagtttgagcagttaaaagaagactatgcatggtcgcagcaaatgcagcgcgacgcgcgccagcaggcttttgctctggctgaagttgtcgaacgtcgggcgcatttcagctattccgactcggcggaaatgctgagcggcaacagcgatctcaacgaaaagctgcgccagcggctggagcaggcggaagccgagcgtacccgcgcccgcgaagcgctgcgcagccatgccgcgcagttaagtcagtacagccaggtcctggcctcgctaaaaagctcttacgacacgaaaaaagagctgcttaacgatttgcagcgcgaattacaggatattggcgttcgcgccgacagcggggcggaagagcgtgcccgccagcgtcgcgatgaactgcacgcccagttgagcaataaccgttcgcgtcgcaatcagcttgagaaagcgctcaccttctgcgaagcggagatggagaacctgacccgtaagctgcgcaagctggagcgtgattatcatgaaatgcgcgagcaggtcgtgaccgcgaaagccggctggtgcgcagtcatgcggatggtgaaagacaatggcgtggaacgccgtctgcaccgtcgtgagctggcttatctgtcggcggatgaactgcgctccatgtcggataaggcgttgggcgcgctgcgcctggccgtcgcggataacgaacatctgcgcgacgtattgcgtctgtcggaagatccgaaacgcccggaacgtaaaatccagttctttgtggccgtttaccagcatctgcgcgaacgtattcgtcaggatattattcgtaccgacgatccggttgaagccattgaacaaatggagattgagctgagtcgtctgacggaagagctgacatcgcgtgagcaaaagctggcgatcagttcccgcagcgtggcaaacattatccgcaagactatccagcgtgagcagaaccgtattcgcatgctgaaccaggggttgcaaagcgtctcgtttggccaggtgaatagcgtgcggttaaacgtcaacgtgcgtgaaacgcatgccaccttgctggatgtgctttcagaacagcaggagcagcatcaggatctgtttaacagcaatcgtctgaccttctccgaagcgctggcgaaactgtaccagcgcctgaatccgcagatcgatatggggcaacgcacgccgcagaccatcggcgaggagctgctggactaccgtaactatctggaaatggaagttgaagttaaccgtgggtccgacggctggctgcgtgcggaatccggcgcgctatcaacgggggaagctatcgggaccgggatgtcaattctggtgatggttgtgcaaagctgggaagacgaagcgcgcagactgcgcgggaaagatatttcgccatgtcgcctgctgttcctcgatgaagcggcgcgtctggatgcgcgctctatcgccacgctgtttgaactatgcgaacgtttgcagatgcagctcatcatcgccgcgccggaaaacatcagtccggagaagggcacgacctataaactggtgcgtaaagtgtttcagaatactgagcatgttcatgttgtcgggctgcgtggctttgcgccgcagcttccggaaacgcttcccggtacgcaaacggaagatacgccttcagaagcgagttaaatacggcagaaacgatgacgtgcctgatggcgcctcgtttatcaggcaaggccggataagtcggttacgccgccatccggcacaacaagttctgctttatcattagcctggggcggcgaaagccgcctttttctttatctgaaaaatctctccgggtagtgcattttctttaaacttctttacattaggttaggcaaaaacgtaacgaactttatatactggagttaagcctgacgagtgagcaggctgactcgtcatactaaacaaaagcattggttgcggttgacccgcgctgcgggcagcacagtcatgcggagtatgataacgaaaacagggggcaagggatgttgcttaacaagatgtgtggtcgttgtctgtcggcaatcagtttatgcctggccgtaacattcgctccactgttcaatgcgcaggccgatgagcctgaaatgatacctggcgatagcgccgttgccgcgccggatctagctgggccgcagaagcaatcagccgcgacggcgattatggccgggattcagccgctgccggagggcgtttcagccgagaaagtccgggctgatttacagtcgcagcttccttccggctatacgccggtctatatgagccagctgacattgctgtatgccgcgcgcgacatgaagcccatgtgggataatcgcgatgcggtgaaagtcttccagcaacagttggcggaggtggcgattgccggattccagccgcagtttaccgcctgggtggcattgttgaccgatcccgccgtaaacggtatggcgcgcgatgttgtgttgtcagacgctatgatgggctatctccatttcattgcgaatatccccgtcaaaggccagcgctggttatatagcaacaaaccttacgcattggcgacgccgccagtctcggtgattaaccagtggcaaatcgcgctggaagaggggcagttgccgatgtttgtcgccagcctggcgccgcagcatccacagtatgcgcccatgcatgacgcgctgctgaagctggtggcggactctcgcccgtggccgcagttggccaataccgcaacgctgcgcccggggcaatggagtaacgatgtgcctgcgctgcgcgaaatattacagcgtacggggatgctggatggcggtccaaagatagccttacccggcgataacactgctgatagcgccgtcgtcagcccctccgccgtggtcgacgaaacatcggtggcgcagccggtcgacgaacaaacggcccgccgtagtaagccggctccggcggtacgcgccgcctacgataatgaactggtcgaggcggtaaagcgttttcaggcatggcaagggctgggggcggatggcgttattggcccggcgacgcgtaactggcttaatatgacccccgcgcaacgcgcaggcgtactggcactgaatatccaacgtttacgcctgctgccggcggaactctctaccggtattatggtaaacattcccgcttattcgctggtctactatcagaatggcaaccaggtgctggcttcgagggtgatcgtcgggcgtcccgatcgtaaaacgccgatgatgagcagcgcgctgaataatgtggtggtgaacccgccgtggaacgttccgcccacgcttgcgcgtaaagacattttaccgaaggtgtggaatgacccaggctatctggagcgccatggctacaccgtgatgcgcggctggaacagcaaagaagcgatcgatccgtggcaggttgactggaccaccattacgccatcgaatcttccgttccgtttccagcaggcgccaggcgcgcacaattcgctggggcgttataaatttaatatgccgagctctgatgcgatctatctgcacgatacgcctaaccatactctctttcagcgtgacgccagggcgttaagttccggctgcgtgcgggtcaataaggcctctgaactggcgaatatgctcttgcaggatgctggctggaacgatgcgcggatctcaggcgccctgaagcaaggcgacacgcggtatgtcaatatccggcagaacattccagtaaatctttactatctgaccgcgtttgtcggcgcagatggacgtatgcaatatcgtacagatatttacaattacgatctcacagcgcgatccagcgcacaaattgtgccaaaggttgaacaattaatcaggtaaatgaagaagttctggtaaatatgttgtcctaatgtttggcttcaacggggcgtttcgctgtagacccccgttgtggctgggggagggccatcttgacgcgggctttatcggcagttaaggtgcctttcgtgcgccagaagtgcatatacaacaacctttaagtcgaccgggccgttcagaagtctgtgccagccggtatcatgtctgcttaaaggtagaagtgtattaacgataacattgacctgtagacctgattatcatggacaaatttgacgctaatcgccgcaagctgctggcgcttggtggtgtcgctctcggcgccgccatcctgcccgcgccagcgtttgccacactctcgaccccacgcccgcgcattttgacgttaaacaatctccataccggagagtcaatcaaggcggagtttttcgatggaagagcctacattcaggatgaattagcaaagttaaaccattttttccgtgactatcgcgcgaataaagtccgatcaatcgatccccgcttgtttgaccaactttaccgacttcaggggctgttagggacgcgtaaacctgtgcagctcatctcaggctaccgttctcttgataccaataatgaattacgcgcccgtagcagcggcgtagcgaaaaaaagctaccatacaaaagggcaggcgatggattttcatattgaaggcgtggcgctgagcaatattcgcaaagcggcgttatctatgcgcgcaggtggtgtaggatattacccacgtagtaactttgtgcatattgataccgggccggcgcggcactggtaatcagcgaggcttaatcaaaggagcagtatgaactatcgtattattccggtcaccgcgttctcccagaactgttcattaatctggtgcgaacaaacccggctggcggcgctggtcgatccgggcggcgacgcggaaaaaattaaacaggaagtggacgccagcggcgtgacgttgatgcaaattttactcacgcatgggcatctcgatcatgtcggcgcggcgagtgaactggcgcagcattacggcgttcctgttatcggtccggaaaaagaagatgagttctggctgcaaggactgccggcgcaaagccgcatgtttggtctggatgagtgtcagccgctgacgcctgatcgctggctgaacgacggcgatcgcgtcagcgtagggaatgtgacgttacaggtgttacattgtccgggacacacgccgggacacgtggttttctttgatgaacagtcgcaactgctgatctccggcgatgtgattttcaaaggtggcgtcgggcgcagcgattttcctcgcggcgatcacacccagttgattgacgccattaagcgtaaattattgccgcttggcgatgatgtgacctttattcctggccacggcccgctctctacgctcggatacgagcgtctgcataatcccttcctgcaagatgagatgccggtctggtaagcagaatgaaaaagcctgcaatgtgcaggcttttttatcggtcacgccagtcgacagctttttatagtaccgcgacaatggcttcgcacagcggcgccatattatccggggtcatgcccgccacgttcacgcgaccagaagccacggcataaacgccaaactcttcacgcagacgtagcacctgatctttggtcagaccgctgaatgagaacatcccgttctgcttgataataaagctgaagtcacggttcgcgcctttttcctgcaaggtattcacgaacagttgacgcatacgctgaatacgctggcgcatgtccgtcagttcctgttcccagatagcgcgcagggcgtcattactcaggatagtcgcgacgatggacgcgccgtgcgctggcgggttggagtagttagcgcgaatggcggatttcatctggctaaaagcgcgatccacggtttccgcatcggcagccacgagggtgcaggcgccgacgcgctcattatataagccgaagtttttggagtaggagctggcgacaataagctctttatgcagcgcggcaaaggcgcgcagaccttccgcatcttcttccaggccgcgggcaaagccctggtaagcgaaatcgaatagcggcagccaccctttttcaacggaaagctcagccagaacctgccactgttccagagtagggtcaatgccggttgggttatgacagcaaccgtggaacagaaccacatcgccggcctgtgcttcgctcaggctggcttgtagcgcttcaaaatccagcgtgtgattttccgcatcgtagtaagcgtactcccgaacttccaggccggcagcgttaaacacgcttttgtggttcggccagctggggttgctcacccacacccgttttaccggagtattttttgccaaaaagtcggcggcaatgcgtaacgcgccggtaccgcccggcgtttgcgccgtgcgtgcgcgcttgtcgttaatcagcgcgctgcctttgccgaacagcagttcctgagtgcagcgagcaaattccggaatcccgtcaatgccgagatagtttttcgtcgtttcattttccagtaaatactgctcggcttttttaacgctggtgagcaccggtgttttgccggtttcatctttatatacgccaatgccaaggttaattttccctggacggtcatcggcgcgaaacagatcggccaggcccaaaatcgggtcggcaggagcggcggttatgttctcaaacatgacgaggttccattatagttacagaagggaaatccgctatcaggttaacggcagatttacaaaatgccaaccgttagcgctaaaaagcccgcctgtttttgaaagacgcacattttctctaagagagataaaaaaacaggaccgaagtcctgtttttgaggcataaaacaaaggggtctgctgatcagaactggtaagtaataccgacagccgcctgatcgtcggtgccaacgtagctggagctgtagtcgttttcgtccagcaggttgaaacggtagtcaacccatacgttcatgtttttgttgaagtagtaagtcgcgcccgcctgaatatatttcgccagatcggccgagccgtcggcgccgttcaactgcttacctttactctgcacatacgagattgccggacgcaggccgaagtcaaactggtactgagcgaccacttccaggttctgcgttttgtttgccatttccacggtatcggtaaccgtattttcaacaatgctcatattgcgggtttcagcatatacggcagccaggtagacgttgtttgcatcatatttcgcgccaacggcccatgattctgcgcgatcgccattaccatcgcgatcctgctgatcgttagtacgcttgctgttgctgtacgctgcggtgacgccaaagccgtcgaactcatatgccatggtgtaacctacgccatcgccattctgagagttaatgctgtggttgtcctgatttttaccctgatactggataccgaaagagagaccgtccaccagaccaaagaagtcagagttacggtaggtcaacaaaccgccagcacggctggtcatgtagttatcagtataggcgccgccccaggtttcgccggagaagtagggggccatatcggtataggattcaacatcgtaaacgataccgtagttacgaccataatcgattgaacccacttccgcgtatttcaaacccgcgaaggccagacggaccagattcgagttctgctgttcgccttcagcgcggtctgctttagtacggtattcccactgaccgaaaccggtcagatcggtgttaatctgcgtttcccctttaaaaccaatctgggcataagtctggtcggcatttttgctatcgccggtcgttgtccatacgtgacgacccacggctttaccgtacagatccagcttattaccatctttattataaatttctgctgcgtttgcggttgcagcagccagcagggcagggatcaccgctgccaggattttgcgcttcatcattatttattaccctcattggtttttttatatgacacctgccactgccgtcaataaaactttacagaaatattgatgagagtttggtgtctttatgtgtctgacaggcatctttccattcaaactaacgtttcgctaccgtgaaagtgctacaaatataaagatttagtttcaaaaggaaaaaatatgtaaacaaatgttattttcgcggaactttgtgaacaacgtcaaacttcccctgagttctcgctttgatttgatcgtttttcttttatcactatgattttattgtaattattggcttgtagaaccgttgtgcctgaaaaagcagcagaagagctatttcataaaaatagccatttagaagtcttgatgtctgaaattgtggtgaaaaattgtgctattagaacagaaaaatctaatccgcaataaaattaaggattaatttttatgtgtaaatattttcgtgaaatatacagtaacaagatgtggtaattcagagggttgtaattaaatttatttacttattgataataaagctgacattcaggcgaaaaaaaaggccagcatagctggccttgagtgtgacgtaaaaatcagaagctggcgttgcgtggggtccgtgggaacggaataacatcgcgcacgttttgcacacccgtgacgtaagcgataaggcgttcaaagcccaggccaaagccggaatgcggtacagtaccgtagcgacgcaagtcgcgataccaccagtaatcctctttattcagccccatttcggccatacgggcatccagcacatccagacgctcttcacgctgggaaccaccgatgatttcgccgattcccggcgccagcacatccatggccgccacggttttgccatcttcgttaaggcgcatgtaaaatgctttaatttccttcggatagtttttcaccactaccggcgctttgaaatgctcttccgccagataacgttcgtgttcggaagagaggtcgacgccccagaacaccgggttttcaaatgtcttaccacagcgttccagaatggcgaccgcatcggtgtaatccacctgagcgaagtcggtagagacaaaacgctccagacgagcgatagcgtctttatctacgcgttcggcaaagaacttcatatcatccgcacgctcttccagaaccgccttgaagacatatttcagcatggcttccgccagacgggcgttgtcttccagatcggcgaacgccacttccggctccagcatccagaactccgccaggtggcggctggtgttggaattttccgcgcggaaggtcggcccaaaagtatagattttggacagcgcacaggcatacgtttcaccgttgagctggccggagacggtcaggaatgattctttgccaaaaaagtctttgtcaaaatctactctgccctggtcgttacgcggcaggttttccagatccaacgttgagacgcggaacatttcgccagcgccttcggtatcggaagcggtaatcagcggggtggagacccaaaagaaaccctgctcatcgaagaagcgatgcagcgcctgcgccagagtatggcgaacgcgcgctaccgcgccaatcaggttggtgcgcgggcgcagatgcgcgacctcacgcagatactcaatgctatggcgttttgccgccatcgggtaggtatccggatcttccacccagcctgcgacctctactttcgtagcctggatttcgaaactttgcccctgtcccggcgacgcgacaaccttacctgttactaccacggagcagcctgtcgtcaggtgtaatacttcttcattataattgggcagagaattattaatgacagcctgtacaggatcaaagcaggagccgtcataaacggcgaggaaggagatgccagcttttgaatctcggcgggtacgcacccatccgcgcacggtgacttcttggtcaacggctacgcggccctggagtacgtcggctacaggcacaacgctcataatattctctctagttaatagtcggaaaaaataaacacttgtccacccgaaatgggggtattcctatgttacctggcatctgcaatcagacaagcagaaatcgcatctggaagcaggttttcagaaagaaacctgtaaaaagttcgcacctgctcgcgaaccattgagaatttaggctggttttgcaagctttgcgcacgttactcgatcaggacgcgcatctcttgcttggcgttttgcatcacgacaatcgttttaaaagacttaatattgcctgaggaaaagaaaagctcacgggtaagcgcttcatattccgccatgtcacgaacattgagcaccagtaaaaagtcgaaatcgcccgttacgtagtagacctgctgcacctgcgggcaactgacaaaccgttgacgagcctcttccagtaaattgaatcgctcgttttcgatcaccacctgcaccacaatcgtgaccgggcgtcccactttgccagcatcaataaggctgacattgcctttaattatgcccgcctcctccagtgccgcgatacgacgattcactgccgaaggtgaaagattgacctgttcggcgatttcccgctgagaaagacgattatcgcgctgcaataatgtcagaatgtttttatcccaggcgtcaagcttcatatcgcaaataacctctttaatgtgatgactatcactgtgcgcaattttgccgcgtccaggtcgttaaaaaaaggtgaaaattgcacgacgatgggcattttcgcgccatttaacagcaataagcatagtactatcataatcagtggaataaagaaaaggacgtaatagatattgtgcggctcttttatcagtacggtttattaaagtgaggataaccactactacagccacaaaacgcgagttctttacttgtttctactcaataattgccaaaaacatattatttcaataaataaactttaacaaaaggtatcattatgcatgagcttattaaataccagtttaatacacgtcggaaaaaatatggtacaggagcggctttaagtttgcttaacggaaatgttgggcgtgaggtgttagcatttcataaaaaattacccaattatgccgttacgccgttacataatctggcgcatctaagccggcggcttggactagggtccatccatattaaagatgagtcctggcgttttggtctgaatgcttttaaaggtctgggcggctcttatgctgtaggaaaatatctcgctgataaattgcaatgtgatattaactcgttaagttttgctgcccttaacactcctgagattaaagaaaaaattaaggattgtgtttttgttaccgcgacggatggcaatcatggccgtggtgtggcgtgggcggcggagcaattaggtctaaaagccgtcgtttatatgcctaaaggatcatcgttaatccgggcagagaatattcgccatcatggagctgaatgcaccatcaccgatctgaactacgatgatgcagtgcgactggcccatagaatggcgcaaacaaaaggctgggtgcttttgcaggatacagcttggacagggtatgaagagatcccaacgtggattatgcaaggctatatgacactagcggttgaagcttatgatcagctcgcagaaacaaacagtccgttgccaacccaccttattttacaagcgggggtgggatcatttgctggcagtgttatgggttattttgttgaaaaaatgcaggaaagtatccctaatattattgtggttgagccgcatcaggccaactgtctttatcaatccgcagttatgaatgatggtcaacctcactgcgtcactggcgatatggcgacgataatggccgggcttgcgtgtggggagccgaatattatcagttggcctattattcgggacaacaccagttgttttatttccgctgatgattgtctggcggctaagggtatgcgcatttctgccgcgccgcgtccaggtacggatacgccttttatttccggcgagtccggagctattggcgtagggttgctttatgagttgatgaacaatatgcattatcaggatcttgctaatcgcttacagcttgatgccaatgctcatgttctgcttattagcaccgaaggcgatacgtccccagatatttatgaagatatagtctggaacggacgcagtgcttaaacattacgactaaaaaattagataataaaggcagcatgtaaaaaacgcgttttttatacgcataataaacctaatgcaggaagcaaaacttcataacaatataccattaaaacggcatttagtgagtaagggatgctcctacccgctgactttccagtttagtgttgttggcaaaattcaggattacgctgaactggaaagattatttctgagactgaacgaattaatttaaatccgaggtcattatgttagagcaactttcacaactctttgaatttctatggggtggcccattatttttgtgtgttatcggcattggcttttatttcacagtacgcctcaaatttttccagattatcaatttaaaagaaatttaccgtaatacaattggtacacttgccggaaaaaataaacaaaacactactggcgaggcagcgtctaaaaaatccttaaaatcaatagaggtggctgccactgtgctatccggctcattaggcgcgggaacgatcgcaggtgttgctgcggctattgcggttggcggacctggggcaattttctggatgtggatcattgcggtcgtgggtatgatgaccaaaatggttgaagtgacgctggcggtgaaataccgaagtaaaggtgagaatggcgaatattatggcggcccaatgcattatattaagaaagggctcaataaaaaatggcatcccctggcaggattatatgcgtttgcattaatgattctggttattacggatgcctgttttgtgcaaactaatacgatggcggcggtcattcactatacgtttgaaatcccaacaagcgtcatcgggggatttattgtcatcgtaggcgcgttggttattttaaaaggactctccagtcttggtaaattctgtacgattgcacttccaccgatcaccattgcctatttcattggtgccgctggtgtagtggtattgaatatcgaggctatcccacaggttataaaaagtattttctattatgcctttgcccctgcgccagcagtcggtggctttgtcgggtcaaccatcatgatggccatcagtaaaggagccagtcgcggaatattcactaacgaagccggcatgggtacctcggccacagtacatgctactgccaacgtggattatgctttccgtcagggaatgtggggggcagtggaagtattttttgtctcaatgattacctgtaactttaccgcatttgctgtacttgcttctggtatgtggacagacgccagttatcaaggtattcagattatctttgccgccttaaaagaaacatggcatccgattattgttcaggttctctgtctcggtgtggcgttgattctgtttacttcttatcttggttcatatattaaatttcgcacttcgataaactatatctttggcgataagctagaacgcatcattaaatggctatattttttgccgccactgattgccgttaatatggaaatcccggtaatctggttaatggctgatattgctgtcggttttctggttatccccaacgtaattgctctgttcttgctgcgtaaagaatttattagcgaattcaatttattcagaacgcgtacacagcgggacactcattctgaaaaaacaacgcaaattacgcacgtaaatatgtcgaagagtgaagggaaagaggagtaaccatcgcggccagaacaggtaagatggtcagaagagtaacaaagcgcccactttccgggcgcttcgcacaggcatggttaacttgctttacgcacctgcgggagatcgaacgctttacgcagcgcgcgcacaaacgctttatcatgacagatcgttttaccggggctgtcggaaagtttagccaccggctttccgttacattccacgagcttaatcacgatattgagcggttttacctgagggatatcgcaggtcaggcgggtaccgatgccgaagcttaactgcacgcgagaggcgaaatggcgatagagctcgaccgcctttggcagatcaaggttatctgaaaagaccagcgtttttgtcagcggatcaatccccagcttttcataatgggcaatcgccttttcgccccatgcgacagggtctcctgagtcgtggcgtaacccctgataacggctggcgaattcaatgccgaaatcgcgtaaaaacgcatccattgtaatgcaatctgtcaaggcgataccaagctggtccggatattcgttaagccaggcggccaacgcggcacgctggctggtcgccaggtccggactgatttgttgatgcgcctggaaccattcgtgcgcctgagtgcccatcggcgtcagcgccaggcgacgcgcgagatcatagttgctggtgccgacgaaccatgactcctgctggagacgtttaactatcgcctgctgcacttcacgagagaaacggcggcgggtgccgaagtccatcaggtggaagcgggacatatcgagattggcggttaacgcagtgaaatcaaccagcttactttccagcgcgtcgagcgcctgatcaacgcccgcgtttggcgagcggtagtgatgaaccagctcactgatcacggccagcagcggcacttcccacataatgacttcacgccacgggccggttaagcgaatattcagcttgccgttatcgttggtgacacagacttgagctgggttatagcgaaactcgcgtaaccagttcagataatccggtttaaaaaagggcaggccggagagccactggaactcgtcctcctggaggcgcaggtgctgcatcgcgtccacctgctcgcgaatagcatcggcataaatacccagcaggtcgtcgccacggcaacgaaactcagccgctacctgcacatcatagtagtggtgaaaaacggcttgctgcatatgcaacttataagcatctgtatccagcaacgagtgcagaacaggagaagcgaattgtgtcataggtgcgctgttgcgtcctctcacgggagcgtttagtacaataaacaactaagaaaaccgctggagtataccttgtttagcgatttattgaaccccgatcacaccataagctgtctttagggtcgagcgcatttcgtgccccatgttataaaaatgtagcgatgcgactgctaaccccttgaatttaaggatttctactgcgctgctaccatgctttggggcagtgatggggcatagcgggaaagtgcctggttgagcagagaaacctgttctgcgctcttctctgacatccactttccatacaccttgtaaaccatctgtgcatcggtatgccccatctgcgttgctataaagtttgggttagcaccagctgataatgaccagcatgcataagggttcatgccccattgcatagcctgcatgacgatagccatacagtcggctggtttccctgcaaggtgtgccggtaccgtcacctgtgagtctgccatcaggttagcgaaagctgttaactgacccagtgcctgaacgttaaaaattgcgttactggcagaaatggtgtttggtgcctgctgctcagtggtaacaatatttgtgttttccatgattttccccttatgcctgtatgtacggtgtacagggaacgcctgactgttaccggattgaactgaaaaatgtttatggtgtacaggagaatctgatctcataccgacaggcatcgctgggggcatgggtagcgattgctggtggcggcgatccttatgaagtggcttacgctatctataaagccgtgccagatatctccgtactgacgaatgatgtagtgaatccatcaggcgctgcggtggataaaaaaacgataccgatcattgtgtatccggatacgtatcacgtgccgtttgtagtgccatcatcacaaaacgttacgcttttaatcacctggaatacagcctcaaccagctatatcgatccaaccgggattgaaaaagcagtgcagcaaagcattgctgattacattaacggaattgcaacgggtgaaccaataaacattttcctgattcgggatatttttcttaatcaggttaaggggcttgtatcttcaaaccttgtatcaatgattgatattcaggttggaataaacggaaaaattgtcccacctgcaaccgactccagcctggtttatggtgatacttacgcctatttttccacttcatcttcacaaattcaggttaagcaatatggcagctcttcttgaaagcattattccggcctacccctatacgcaatataatgacgatccggatatagttgccttttttgatgcttataacaaactggcacaggggtatcttgattactttaacaacctgaatttaccttgctggacctccccggcgattaccggtgagttgctggactggattgcggcgggtatttatggggaatcacgccccttgcttcaaatctccgaggatgccattgctcgtggggcgtataacactattgagtacaataatgtcgcgtatgcaaaactgagaaattatgttcccggctcagcgtcatatgttccggacgactattttaaacggatactgacatggaatttttataaaggcgatggttcgcacttctgtatcaactggttcaaacgacggcttgcacgctttatacatggagctaacggaatagacccacctgtacagtccacttttgatattagtgtaatgcccgataagggcattttttttgtctccattcctgactatggcgatggtgtcggacactttcttaaagatgcaattgaccagtcgctggtgaaactcccttttatttatacctattcggtaacggtggttgagcaatgattattggattcggaaataatgtcgtctcctcactggcggctgatattaccgccagccagacgaccattcaggtgatgcctggtgtgggagcgatgtttgctaatttgctgaccagcgattatgcaaacagctcaaaccctcttaaaacttacgccaaaattacactgacagacgcaaaagaaacagtttttgaggtatgccatctgacagcagttaataatgacatgctgacggttattcgcggtcaggaaggtacaacagcgaagggatggtcactgaatgacgttatagcgaattttgcgacgcgaggatctgaaaatcagtttgtacaaattgaagagctccagagtgggcattatgtcgctggtgtggccggaggtacagaaaataatctgacgctggagttaccagcaacttatttcgtcaatggtggagttgactggacattgcgcactccacttgtggttattccggcgctaaacaataccggagccagcactctgcaactgacgatgggaggacgtgtgcttggcatattcccactatacaaggggaataaagcagagttatcggccaatgatattattaaagatattcctgtcttatgcgttctggataatacaaaaacctatttttctgtgcttaatcccctggagatttatttgggatcacggtatttgcagaaggaccagaacctgtccgacgtaccggataaggccaaaggtcgctccagtcttgaggtctacagcaaaaccgaaagtgatgaaaactacatggctaaaagccagtgtggtgcggatatcccgaataagccgctgtttgtacaaaatatcggagcgctccctgcatcaggtacggctgttgcagcgaacagactggcatcacgcggcgcgcttccggcactgactggtacgacaagaggcagcgatagtggcctgataatgggcgaggtttacaacaatggctatccgacgcaatacggaaatattttacgtctgaccggaaccggtgatggggaaatcctcattggctggagcgggacaaatggtgcgccagcgcccgcatatattcgcagccatcgagataccgccgatgctgagtggtccgaatgggcaatgctttacaccacactaaacccacctccggattcgcatccagtaggggcggcgattgcatggccatctgatgctactccggcaggttacgctctgatgcaggggcagtccttcgataaatctgcttacccgttactggctatagcgtatccgtccggcgttatccctgacatgagaggctggacaataaagggtaagcccatcagtggacgtgccgtattgtcgcaagaaatggacggcaataaatcgcactcgcacaccgcgcgggcgcaggttactgacttagggacaaaatctacctcatcctttgattacggcacgaaatcgaccaataccacgggcaatcatactcaccagttcggcggttatatcaattcatactggggagattccaatcacacctcatttcagccaggaggtggtgcatggacacaggccgctggcgaccatgcacatacagtttatatcggaggacatgagcacaccatgtatataggtccacacggacacgtcgttattgtggacgcagacggtaatgcggaaaccacggttaaaaacattgcatttaactacatagtgaggctggcataatgacttttaaaatgagcgaacaggcgcagacaattaaaattttcaatctgcgttcagatactaacgaatttattggtgcaggtgatgcgtatattccgccgcacacaggactaccggcaaactgtactgatatcgcccctcctgatattcccgccagtcatattgctatatttgacgctgaaacccagacatggagtttgcatgaggatcaccgcggcgagatggtttacgacacaacaaccggcaatcaggtttatatctccgctcctggtccgttgcccgaaaatgtcacatcagtttcaccaggtggtgaataccagaaatgggatggtaaggctaaggtctgggtaaaagacgaagcggctgaaaaagcagcgcagcttcgtcaggcggaagaaaccaaaagccgtcttttgcaaatggcatctgaaaaaatcgcgccattgcaggatgcagttgatcttggaatcgcaacagatgatgagaaagcgcggctcgacgaatggaaaaaatatagggtgctggtaaaccggatggatacagccgcccctgactggccggaaagaccagccagccagtaggcgttactgtggtaatgcaggccacctgattgctgtgaaggtggcctcatctgaaacacctgttaagtccagcgatttaagaacattgatataattcatcggcagaatcaaagctgctttattttcatcactgataattcccaacgttaattctgtgcgccagtccttaatggcattatctgcatcgttaagtaatttctgccgggtgacttctgcccgccaaaattgaacgcccgggcgctgatgccggatgatctggtcatcgtggaaagcgaccctgaaaaaatcgacactttagctgtaaaatgacagtcccgccatccggtcatcataacggatttttcttctgcaccttctgaagcccgccatggcaggacgaccatgaatccgccgataaccttattgtgaaattaagaccaggaagagatgatgtctgtcggacagatactatatgtaaatttataaaggttttttgttatgccctttcatattggaagcggatgtcttcccgccatcatcagtaaccgccgcatttatcgtattgcctggtctgataccccccctgaaatgagttcctgggaaaaaatgaaggaatttttttgctcaacgcaccagactgaagcgctggagtgcatctggacgatttgtcacccgccggccggaacgacgcgggaggatgtggtcagcagatttgaactgctcaggacgctcgcgtatgacggatgggaggaaaacattcattccggcctgcacggggaaaactacttctgtattctggatgaagacagtcaggagatattatcagtcaccctggatgacgtcgggaactataccgtaaattgccaggggtacagtgaaacacatcacttaaccatggcaacagaaccgggagtggaacgcacagatataacttacaacctaaccagtgatattgatgctgcggcctatctggaggaattgaaacagaatccaattataaataataaaataatgaatccggtagggcagtgtgagtcattaatgactcctgtaagcaattttatgaatgaaaaagggttcgataatattcgttatcgaggtatatttatctgggataaaccaacagaggaaataccaacaaatcattttgcagtggttggaaataaagaagggaaagactatgtgtttgatgtttcagcccatcagtttgaaaatagaggtatgagtaatctgaatggcccattaattctttcagcagatgaatgggtgtgtaaatatagaatggcaacaagaaggaaacttatttattatactgattttagtaattcaagtatagcagctaatgcctatgatgcattaccacgagaattagaatcagaatctatggcagggaaagtttttgttacatcaccgagatggtttaatacctttaaaaagcaaaaatattccttaataggtaaaatgtaagcgcaccgtggaggacgtctgtcagaaccctgtcaatccggcgatgatagtgtccacttaaattttgatggacactatcacagatgacagagtccacagcccggcgcaaacacggctgtcggtcaggaaagagaaaagccagtcgctgtacgactggatacaggcgcagttgaaaacgttgtcggtgcatgcggagatggcgaaggagttcggttacatgctgaagcagtgtgatgcgttgagcgtgtcctctgcagcgacggtcgggtggagatcgacaacaacatctgtgaaaacgccttacggtgcgtggcgctgggccgacgtaactatctgttcttcggctcagacaggagcggcgaggcagcggcgatcatctacagcctgctgggtacgtgcaaactaaacggcgtagagtccgaggcatggttacgcgacgtgctgtggaaaatcagcgactggtcatcgaaccgggtgcacgaactgctgccctggaacctcgaaaccgtaaaataatccttacgctacgtcctaaacgggacgcttactgagttatgagggtgaggtggttttcttaatgagcatctgaacgccggtttgtgggatagggcaggtgggacggattcgggacagtcatccgtttttaactattggcatggattggtatcttttcgcatcatgggacgtgtgagcgcaggtatgacgcggtatgttattgacttagaatgtggttccaggaactggcgcatccatacccgagcagtttccggtgtcagtgccagcgggcgacgatcgtgaatgtctaccagacctttatcggctgcggaggtaacaatcaggaatccctctgcttcatcaccgcgctcaaacggcgtactgccaatggcagccatgaatatcggcttcccgtcctttctgtgaatgaaatacggctgttttttgtcgccttccttcttccactcgaaccatctatcggcaaaacagatagcccggccatgctgccatagtggcttaaacattctgctggaggccgctgtcgcgacacgggcgttaataagtggagctttatcccaccatccgggagcgtaaccccaaatcaccgggtcgagatgtaattgctcgtcgcgttcgctcaatagcaggactttagtcccgggcgccacgttataccggcctataggctgagggtcataagcaatattacgatcggcttcgtcggccagatatgccagatattcttcacgggtctgtgcttgtgcaaagcgtccacacatatgaaacctccagtcgtcagactgaaagtatagggcagggggaaaatgtggcgcgctccggtaatgatttacagggaatttatacagtaattcgaaatgaaaatttgtgtattgatgaattccgaaactgagcagtgagcaaactgatgaatcaatcgcaaattgcgtcgaatctcgacggctttattccccagtttcaccccatagcttccccgtaggaaattgagccataaaaaaaacagccctgacaggctggtttttaaggggaattttggtcggcacgagaggatttgaacctccgacccccgaccccccatgttggcggtagcctgaataattatcttggtaaaggttaactatcataaaatggtacaccagtctttccaggaggaggagtgtaaaggttttggctcataaacaccgtcatagtaaagaccacaaatactgcaatcttcatttttatatttatcattgaatgctaaggtaagcttgtcatagacatcaatatttgattgccattcaggtgaggtattcattgaatcataaattaatacttttttcacttcactatcatagcctacaatgcactctgcatgtagacattccgagccaagtgaaggcctgatcaacatcagtggtccatggttttgtaattcgtaagaaataaaactctcaaagtcatcttctacagtactattgaaaacttctgcctgtaaagcttctttaatgtttgtaaaaagagaggattcaggtattttttgcacattcatttcttttaataaattctcacattctattatatcaataccctctaatatattattaaacgcttgattatcagaagtgatgtcctctaatgcactataattattgccatctctggatttgataacatttaatgagcaaacccagcaattattgtagagggtgttgcctgtggtatcaaactggctttgaaagttacgatggtgaataatctgaccctgaggagttgctgtattacttctgtaaacgctgcctaaactattttgaatgtgtcttaacataatatactcgccgaatagtaattttgttaatgtaattatatactacagtgtggatattaatacaattcttttgttgttaattattatttatgaaattaattgaaagtgaataagttagaggtgtttgttggccttaaaattacatttgttgagggggcttatatgatatgtttttattgtattgtcgcatttttcttaagctgaatccggattttggggaggtggctaaatgtaaatgacgtggtttaagataaatctatttttaataagctatctgttcaaattttcgcgatcgcttttgttggtatcactattcaagcagtttgcctgcatcggcttcaccctcacttcggcatcagggaaaatctggtgcacctgcttcgtcagttcggccagaatgatctcgctggccccttcgagtccttcaacattacgcttgtcataaaccagttctacgaacatacgtgtttcgctaataactgtttgtatatacagtatttttgctttggcggttttgtctgtcaaggcatgaaccacttgtttttaaattttggggaacatactgcgggcgtgtttgttatcgattttccctgcagggctgatggggtctggcgttgactaaaattatgtgtggggcatggatggggcaaaagtggtctgtgaagttcgttaaagttcgttaatcaagcttcatctcgatctcgctcatcccttgtttaaagcgctcctggacgatctttatcgattttaaaaactatgagtacatattataaaaatgtagcaaataggccgtttgtgcctgaaaagatgaacattctgcgtagcgcgatttgcgcaacaggaatagactggagtcgacactctacacaaagatgcgaaaggttttttatgacacaacagccacaagccaaataccgccatgactatcgcgcgccggattaccagattactgatattgacttgacctttgacctcgatgccgaaaaaaccgtggtcaccgcaataagccaggctgttcgtcatagcgcgcctgatgcgcctcttcgccttgatggggaagatttaacgctggtatctatccacgtcaacgatgcgccgtggacagcatataaggaagaagagggcgcgcttatcatcagcgacctgccagagcgttttacgttacgcattgtcaacgagataagtccggcggcgaatacggcgctggaaggattgtaccagtccggcgatgcgctctgtacccagtgtgaagcggagggcttccgccatattacctggtatcttgaccgcccggacgtactggcgcgatttaccaccaaaattattgccgataaaagcaaatatccgttcctgctctccaatggcaaccgtgttgcacagggcgagctggagaatggccgtcactgggttcagtggcaagatccgttcccgaaaccgtgttatctgtttgcgctggtggccggtgattttgacgtgctgcgcgatacctttaccacccgctccgggcgtgacgtcgcattagaactgtacgttgaccgtggcaatctggatcgcgcgccgtgggcaatgacctcgctgaaaaattccatgaaatgggatgaagcgcgttttgggctcgaatatgacctcgacatctatatgattgtcgcggtggatttctttaatatgggcgcgatggagaataaaggtctcaatatctttaactccaaatacgtgctggcgcgaaccgataccgcgacggataaagattatctcgatattgagcgcgtgataggccatgagtatttccacaactggaccggcaaccgcgtcacctgccgcgactggttccagttgagccttaaagaggggctaaccgtgttccgcgatcaggagtttagctctgatttggggtcacgcgcggtgaaccgcatcagtaacgtgcgtaccatgcgcggtttacaattcgcggaagacgccagcccgatggcgcatcctatccgcccggataaagtaatcgaaatgaataacttctacaccctcaccgtttatgaaaagggcgcggaagtcattcgcatgatccacacgttgctgggtgaggaaaatttccagaaggggatgcagctttattttgagcgccatgacggcagcgccgcgacgtgtgatgacttcgtacaggcgatggaagatgcttctaatgtcgatttgtcccatttccgccgctggtacagtcagtccggcacgccgattgtaacggtaaaagatgattataatccggaaaccgagcagtacacgttgaccatcagccagcgcactccggcgacggcggatcaggcggagaagcagccgctgcatattccattcgccatcgaactgtacgataacgaaggcaacgtcattccgttgcaaaaaggcggtcacccggtcaacgccgtgctgaacgtcacgcaggcggagcagacatttaccttcgataatgtttacttccagcctgttccggccttgctgtgcgagttttcagcgccggtgaaactggaatataaatggagcgatcagcagttgacgttcctgatgcgccatgcgcgcaatgatttctcccgttgggatgcggcgcaaagcctgctggccacatacattaaactgaatgtggcgcgtcatcagcaggggcaaccgctatcgcttccggtgcatgtcgctgatgcgttccgtgcagtactgttggatgagaaaatcgatccggcgttggccgcagaaattttaacgctgccttcggccaatgaaattgcggagctgtttgaggtcattgacccgatcgccattgcgcaagttcgtgaagcgctaacgcgtacgctggcggcagaactggcggatgagttcctggctatctataacgccaatcatctggatgagtatcgtgttgatcacggcgatatcggtaagcgcacgctgcgcaatgcttgcctgcgcttcctggcgttcggcgagacggagctggctaatacgctggtcagcaaacagtatcgcgacgccaataatatgaccgatgcgctggcggccctgtctgctgcggtggcggcgcagttgccgtgccgcgatacgctgatgcaggagtatgacgataagtggcatcaggacggcctggtgatggataaatggtttatcctgcaatccacaagcccggcggaaaatgtactggaaaccgtacgcggcctgctcaaacaccgttctttcagtatgagcaacccgaaccgcgtccgttcattaattggcgcgtttgctggcagcaacccggcggcgttccatgcgcaagacggtagcggataccagttcctggtcgagatgctgaccgatctgaatagccgtaacccgcaggtagcatctcgcctcattgaaccgctgattcgtctgaaacgttacgatgaaaagcgtcaggagaaaatgcgtgcggcgctggagcagttaaaaggactggagaatctttccggcgatctgtacgagaagataactaaagcgttagcctgacagtatccgttataaagaggtaagacatgcccggtaagcgttagcgctgccgggcatttttttgccggacgatgacgctcgctggcgaaacgtgaagtgagaatgaaggaaaacgattgctatttattgccgtaggtcaattcccttttgccttgttatcgcccataatacgcccccggtttgcacaccgggaatccaggagagttcatgtactatcccttcgttcgtaaagcccttttccagctcgatccagagcgcgctcatgaatttacatttcaacaattacgccgcattacaggtacgccgctggaagcgctggtgcgccagaaagtaccgacaaagccggttacctgcatgggacttacctttaaaaatccactggggctggctgccggtctggataaagacggggagtgcatcgacgcgttaggcgcgatggggtttggctccctggaaatcggcaccgtgacgccgcgcccacagccgggtaacgataagccgcgtctttttcgtctggtggatgctgaaggtctgatcaatcggatgggctttaataatctgggcgtcgataacctggtcgagaatgttaaaaaagcccattttgatggtattctgggaattaacatcggtaaaaataaagatacgcctgtcgaaaatggcaaagatgactacctgatttgtatggaaaaagtctatgcttatgcgggttatatcgccattaatatttcttcgccgaatacgccagggctacgtacgctccagtatggcgatgcgctggacgatctgttaactgccattaaaaataagcaaaacgatcttcaggcgatccaccataaatatgtgccggtggcagtaaagatcgcgccggatctttgtgaagaagaattgatccaggttgccgatagcctgcttcgtcataatattgatggggtgattgcgacaaataccaccctcgatcgttctctggtacaaggaatgaaaaattgccagcaaacggggggattaagtggccggccattacaattaaaaagcacagaaattattcgccgtttatcccaggagttaaagggacaattgcctattatcggcgtcggcggcattgactcagttatcgccgcgcgcgagaagatagcggcaggagctacgctggtacaaatttattccggctttatttttaaaggcccgccattgattaaagaaatcgtaacgcacatctaaactttagcctttatcagacaaccagggctttatttccggcgctggttgttttatatttctccactgttgcttatttagacattttaggcttttattattggggtaataaacgaagcggcaaaaggacaatgctgttacgagttgcttaaaagcgggagagaggtaatgcgaattaaacctgacgataactggcgctggtattatgatgaagagcacgatcgtatgatgctcgatctcgccaatggtatactttttcgctcgcgcttctctcgtaaaatgcttacgccggacgcgttttgcccgaccggtttttgtgtggatgatgccgcgctctatttttcctttgaagaaaaatgccgggatttcgaattaaccaaagagcaacgcgcggagctggtgttgaatgcgctggtggcgattcgctatctcaaaccgcagatgccaaaaagctggcattttgtagcgcatggcgaaatgtggaccccaggaacgggcgatgccgcaagcgtctggttaagcgatacggcggaacaggttaatttgctggtcgttgagccgggagaaaatgccgcgttgtgtctgctggcccagccgggcgtggtgatagcaggccgaaccatgcagcttggcgatgcgattaaaattatgaacgacaggctgaaaccgcaggttcactgtcacagtttcagccttgaacaagcggtttaattctccagtcgtaacgcggtcttaggcacgcagctacagctcagaatcgtaccatcgtcacccatagccgattttttcagcggacttacttcgccttccagcaaacgtatccggcagcaaccacagataccagcccggcaagaatacggaatacgaatcccctgattctccaactgttccagtagtacctgttgattattcccgcagaaggtttgcccctgccagtcgatggttacactcgcgtccgggtgtttatctggcgtaacgctgtcgtcgaccgttgtggcgccataagcttttgccggagctgtcgccagaatctccacttcatcgccgacgcgaacgacgccgctattgcgggcaatcagattctgaccgaaatccacatcgccattgtcctgggcggtacgaaaagcttgcagtgtcgccagcggttctccggaaggatgtttttgccccttttcagggctgacggttgtaaaaatacagcggctacagggcttcacgacgtcaaaaatcacatcgccaatgcgaagcactttccagctatcttcctcccaggccgctacgccggaaaccactaagtttgggcgaaattgttccatttgtacgcctgccggacaacgctgttgcagatcgcgcagcgaggcttcgttggtcaataaatacgggtagccatcggcaaatcccagcggcaccgcgttatgtcgtttgacccggcgcgtcaactgcggcccaacccagcgcaactggacatcgcgggagaaaaagccgctcaaccattgattaatcgccgtcggggcgacgcgagcggtaaaatggtttccccagacctcggtcggcgcatcctgcggggtgaaatccgtaaagcgaaccagcgcgctactgccgtctggcgcggtcaaatggaggccgtcgtgtaagggagaaggggtaaaacgtaccatttgtggaaactggcgggcggtaataaatgtgccgtcaggctcggtcaccatgaagatgcgatcaaaagccaggccgctgatatctgccagcgcatgagtcaggccaatgccgcgcatggatttgaccggatgaataaagagccgtgataacgtcgccaccgtacagtccctcaaatgaaaataagccttcaactttatgacatgggcgtgagattagctataatgcgcaacaattttcttagcgtaaaagtgacaatatgaattctctgtttgccagtacggcccgcgggctggaagagctgttaaaaactgaactggaaaaactgggcgccgtagggtgtcaggttgttcagggtggggtccattttcagggcgacacgcggcttatttaccagagcctgatgtggagccgcctggcctcgcgtattatcctgccgatgggtgagtgcaaggtctacagcgatctcgatctttacctcggcgttcaggcgataaactggacagagatttttaatcctggcgcgacgtttgcggtgcatttcagcggcctgaacgacaccatccgtaatagtcagtatggcgcgatgaaagttaaagacgcgattgtcgatgcgtttacgcggaaaaatcttccgcgtccaaatgtggaccgcgaatcgccggacctccgtattaacgtctggctgaataaagaaactgccagcattgcgctggatctcagtggtgatggcctgcacctgcgcggttatcgcgatcgcaccgggctggcgccaattaaagagacgctggcggcagcgattgttatgcgttccggctggcaaccaggtacgccgctgctcgaccctatgtgtggttcggggacactgttgattgaggccgcgatgtgggcgaccgatcgcgcgccgggactgcaccgtggtcactggggatttagcggctgggcgcagcatgacgaaactatctggcaggaagtgaaagccgaagcgcagacccgggcgcgtaaggggctggcggagtattcctctcatttctacggttccgacagcgatgcgcgcgtcattgagcgggcgcgcagcaacgcccgtcgcgccggtatcggggagcttatcacctttgaagtgaaagatgtggcgcaactgagtaatccattgccgaaaggcccgtatggtacggtgatcagtaacccgccttacggcgaacgtctggacagcgaaccggcgctgattgcgttgcacagtctgctgggccgtaccatgaaaaatcagtttggcggctggaacctgtcgctgttcagcgcttcgcccgatctgctgggcagcctgcaattacgtgccgacaaacagtttaaagccaagaatggcccgctggactgcgtgcagaaaaactatcatattgcggaaaccacggcggacagtaaaccggcgacggtggcggaagattacgctaaccgcctgcgtaaaaatcttaaaaagctggagaaatgggcgcgccaggaagggattgaatgctatcgcttgtatgatgccgacctgccggaatataacgtggcggtagaccgttacggcgactgggcggtgattcaggaatatgcgccgccgaaaacggtggatgcgcaaaaagcgcggcagcgcctgttcgatattattgcggcaaccttgtcagtgctcggtattccgccgaataaactggtgttaaaaacccgtgaacggcaaaaaggaaaaaaccagtatcagaaaatgagcgagaagggcgagttccttgaagtcagcgaatataatgcgcgcttatgggtaaatctgacggattatctcgacaccggtctgttcctcgatcaccgtattgcccgcaggatgctgggagaaatgagcaaaggcaaagatttcctgaatctcttttcttataccggcagcgccagcgtacatgcgggtctgggcggcgcgcgcagcaccacaacggtggatatgtcccgcacctatctggagtgggccgaacgtaatttgcgtctgaacggactgagcggccgcgcgcatcgcctgattcaggccgactgcctgggctggctgcgcgaggcgaatgaacagttcgatttgatctttatcgatccgccgacgttctctaactcaaaacgtatggaagagtcgtttgatgttcagcgcgatcatgtcgcgttaatgaaagatttaaaacgtctgctgcgtaaaggcggcaccatcatgttctcaaataataagcgcggattccgtatggatctggaagggctggctgagctggggcttaccgcacaagaaattacgcaaaaaacgctttccccggattttgcccgtaaccgtcagatccataactgctggctgatccgcgccgcctgaaaggaaaagtaaatgtcattaatcagtatgcatggcgcatggctgtcgttcagcgacgcgccgcttctcgataacgcagagttgcatatcgaagataacgaacgcgtctgtctggtggggcgtaacggcgccgggaaatccaccttgatgaagatcctcaaccgcgaacagggtctggacgatgggcgtattatttatgagcaggatctgatcgtcgcgcgtctgcaacaggacccgccccgtaatattgcgggcagcgtctatgactttgtcgccgaaggtatcgaagaacaagcggaatacctcaagcgctatcatgagatttcccgtctggtgatgaccgatcccagcgagaaaaacctcaatgaaatggcgcgcgtacaggaacagctcgatcatcataatctgtggcagctggaaaaccgtattaatgaagtgctggcgcagcttggactcgatcctaacgccgcgctgtcgtcgctctccggcggctggctgcgtaaagccgcgctgggtcgggcgctggtcagcaatccgcgcgtattgttactggatgaaccgactaaccatctggatatcgaaactatcgactggctggaagggtttctgaaaacctttaacggaacgattatttttatctctcacgatcgttcgtttattcgcaatatggcgacccgcattgtcgatctcgatcgtggcaaactggtcacctatccgggaaattacgatcaatacctgctggagaaagaagaagcgctgcgcgtagaagagttacaaaacgcggaatttgatcgcaaactggcgcaggaagaagtctggattcgccaggggatcaaggcgcgccgcacccgtaatgaagggcgcgtgcgggcgttaaaagcgatgcgtcgtgaacgcagcgagcgccgggaagtgatgggcacggcgaagatgcaggtcgaagaggcgacgcgctccggtaaaatcgtttttgagatggaaaacgtcgattaccaggtagaaggaaaacaactggtaaaagatttctccgctcaggtacagcgcggtgacaagattgcgttaattggcccgaacggctgcggtaaaaccacgctactgaaactgatgctgggacagcttcaggctgacagcgggcgcatccacgtaggaacgaagctggaagtcgcctacttcgatcagcatcgcgccgaactggacccggaaaaaaccgtgatggataacctggcggaaggcaagcaggaggtgatggtaaacggtaagccgcgccatgtactgggctatttgcaggacttcctgtttcaccccaaacgggcgatgacgcccgtccgcgcgctttccggcggcgaacgtaaccgtctgctgctggcgcgactgttcctcaagccgagcaatcttttaattctcgatgaaccaacgaacgatcttgacgtcgaaacgctggaactattagaagaattaattgatggctatcagggcacggtactactggtcagccacgatcggcaatttgtcgataataccgtgacggaatgctggattttcgagggcggcggcaaaatcggacgttatatcggcggctaccatgatgcgcgtgcgcagcaagagcagcatctggcgacgaaacagccgatggcgaaaaaaaatgaggaagttattgcccctaaagcagaaattgtaaaacgtggcagtagcaaactaagctataaactgcagcgcgagctggagcagttacccggtcagcttgaagacctggaagcgaagctggaagcgctacaggcgcaggttgcggatgcggccttttttagccaaccccatgagcaaacgcaaaaagttctggccgatttaagtcaggcggagcaagaacttgagcaagccttcgaacgttgggagtatcttgaaggcctgaaaaacggggcataacgaaaggagcgcctatgtgtgaacatcaccatgctgcgaagcacatattgtgcccgcaatgtgacatgctggtggctttaccccgcctctcgcatgggcaaaaagcagcatgtccacgatgcggcgcaacgttaacgaccgagtgggacgcgccccggcagcgtcctaccgcctgtgcgttagcggcactatttatgttgctgctttctaacctttttcccttcgtgaatatgaatgtcgcgggcgtcaccagcgaagtcacgcttctggaaatccccggcgtcatgttttctgaagattacgccagcctcggcacgttctttttattatttgtccaactggtgccggcattttgcctggtgactattctattacttgtcaaccgcgccagtctgccgttgtcggtaaaaaaaacgctggcaaggatctttttcctcctcaaatcgtggggaatggcggaaatatttctcgccggggtgttggtcagttttgttaagctgatggcctacggcgatatcggcatcggcagcagctttattccctggtgcttattttgtctcgttcaactgcgggcgttccagtgtgtcgatcgccgctggttgtgggatgatatcgccccgcagcctgcactggcgcagccgttaacgccggggattaccggtatccggcagtctttgcgttcttgcgcctgctgtacggcgatcctgcctgcggagagtctcgtctgtccgcgttgccatacgaaaggctatgtccggcgtaaaaacagtttgcagtggacgctggcgttattatttacctcgatcatgctttatctgcccgccaatattttgccgattatgattaccgacttactgggctcgaaaatgccgtcgaccattctggctggcgtgattttgctgtggagcgaggggtcttatccggtggcggcggttatctttctcgccagtattatggtgccgacgctaaaaatgatcgccattgcctggctttgttgggatgcgaaaggccacggtaagcgcgacagtgaacggatgcattttatttatgaagtagtggagtttgtggggcgctggtcaatgattgatgtctttgtcattgccgtactctctgcgctggtgcgtatgggagggttaatgaatatttatcctgcgatgggtgcgttgatgtttgctttagtcgtcataatgacaatgttttctgcgatgacctttgatccgcgtctgtcgtgggatcgtgagtacgaaccaggccatgaggagtcctgatagcatggaacctaaaaaaggggaagccaaagtacaaaaggtgaaaaattggtcgcctgtctggatattcccgattgttactgcgcttatcggagcctggattctgttttatcactacagccaccagggaccggaagttaccttaatcaccaccaatgcggaaggcattgaaggcggaaaaacgacgatcaaaagtcgcagcgtggatgttggcgtggttgaaagcgcgacgctgactgacgatctgacccacgtacaaatcaaagcgcggctccattccggtatggaaaagttgctgcataaagactcggtattttgggtggtaaaaccgcaggtggggcgtgaaggcatcagcgggcttgggacgctgctatcaggtgcgtatattgaactacaaccaggaagtaagggcagtcagccggaaagctatcagcttcttgactcaccgccgttggcgccgcccgatgccaaaggtattcgtgtgattctggacagcaaaaaggccggtcagctcagtcctggcgatcccgttctgttccggggctatcgggtagggtccgttgaaaccagctctttcgatccgcaaaaacggacaatgagttatcagttgttcattaaggcgccaaacgatcggttggtcaccagtaatgtccgattctggaaagatagcggtatcgctgtggatctgacatcggcgggaatgcgcgtggaaatgggatcgttgacgacgttgtttggcggcggcgtgagttttgatgtgccggaaggacttgagcaggggcaacccgtcgccgaaaaaacggcgtttaatctctacgacgatcaaaaaagtattcaggattcgctgtataccgatcatatcgattacctgatgttctttaaagattcggtgcgcggattacaacccggcgcgccgctggagttccgcggtattcgtctggggacggtaagcaaagtgcctttctttgcgtctaaaatgcgccaggtatttaacgacgattaccgtattcctgtgctggtgcgcattgaaccggagcgtctgaaagcgcaattgggagaaaatgcggatgttggcgcgcatttgacggaactgcttaagcgcggtttacgcgcttcgcttaaaaccggtaacctggtgaccggggcgctgtatgtcgatctggacttttatcctaaggagccgccgattaccgggctacgcgaatttgatggttatgaaattattcccaccgtcagcagcggcctggcgcaaattcaacagcgactggtggaaacgttggataagatcaacaacctgccgctgaatccgatgattgaacaagcgaccaatacgctgtctgaaagccagcgtactatgcgtcggctgcaaaccacgctggataatatgaacaagattacctccagtcagtcgatgcagcagcttccggcggatatgcaaacgacgttacgcgaacttaaccgcagtatgcagggcttccagcctggatcggcggcgtataacaaaatggtggcggatatgcagcgtctcgatcaggtgcttcgtgagttacaaccggtgttgaaaactctgaacgagaagagcaacgcgctggtatttgaagcgaaggataaaaaagatcctgagcctaagagggcgaaacaatgaaaaaatggctagtcgtgataatggcgttctggctggcgtcatgtagctccggcggagagaataaaagctattatcagctcccgatagcgcaaagcggtgtgcaaagcaccgcaagccagggcaaccgtctcttatgggtagagcaggtttccgtacctgactatctggcaggtaacggcgtggtgtatcaaaccagtgatgttcagtatgtgattgccaataacaatctgtgggccagcccgctggaccagcaattacgtaacacgctggtggcgaatcttagcgcccggcttcctggctgggtcgtcgcttcccagccgttgggaaccacccaggatacgttaaacgttaccgtaaccggattccatggacgctacgatggtaaggttatcgtcagcggggagtggttattaaaccacaatggacagctgattaagcggcctttccatatcgaagccagtcagcagaaagatggctatgatgagatggtcaaagtactggcaagcgcatggagtcaggaagcagccgctatcgcagatgagataaagcgccttccctgagataaaagtaatgtaaatttaaccgcttcaggtcgtgcgcctgaggcggtttttttatttttgacgccggaaaaatagttgttatggctcacattttttgtacaaatgatttaccgtatagctcacaaatatgacattggtgtgaattttgcgcattgacgggcgatccatttagaggtattcgtgtagtgtgattgcacattttgtaatcactgttttcttttccaccagatacaaatatgagggaaacgaggcatgaagagacaaaaacgagatcgcctggaacgggcacatcaacgtggatatcaggccggcatcgccggacgatcaaaagaaatgtgtccctatcagacgctgaatcaacggtcatactggttgggaggttggcgacaagccatggaggacagggcggtaatggcctgattctgtctctttagaaaaagaaacctccgcagtgcggaggtttcgcctttatgggctttgcaagcatgataccgatagcgcggaatatcaattcaacacttagaacgcggaagtatcctggaacaaaccgactttcaaatcgtgtgcggtatagatcagacgaccatccaccagaacctcaccgtccgccaggcccatgatcaggcgacggtttacgatacgtttgaaatgaatacgataggtgactttcctggctgtcggcagaacttggccggtaaatttcacttcgcccacgcccagagcgcggcctttgccttcgccgcccagccagcccaggtagaatcccaccaattgccacatagcatccagacccagacaaccgggcatcaccggatcgccgataaagtggcatccgaagaaccatagatccggattgatatccagctcggcttcgacatagcctttgtcgaaattgccgcccgtttcggtcatcttaacgacgcggtccatcatcagcatgttcggcgcagggagttgcggccctttagcgccaaacagttcaccacgaccagaggcaagaaggtcttcttttgtataggattcgcgtttatctaccatgttttatgtaaaccttattttattgaagcacgcaggatagctaacacgtgtacgctgaacaagtccgatcagttcggaataaaagcgttcagccaacgtaatggccacgggaaacgatgacggccttcctgttgcgtcgcctgcgcgatacgctcctggatagtctgcatcaacgtcgtttgaccttcgccatcccacaccagatttaacagtagcggtaaggcgtcggtcacgtcgtctaccgcccagatagtgaacttctcttctttaaccgcttgcagcagttcagatttaagactgagatggcggacattggctgcagggataatcacgccctgtttaccgtttaattcccgctgctcgcagatggcgaagaaaccttcaattttttcgtttagcccacccaccggttgcgcgcgaccaaactgatcgaccgagccggtaatcgcaatgttttgattcaccggcacattggccagcgcgctgatgagcgcacataattccgccattgaggcgctatcgccatccacttcgctgtaggactgctcaaaggttaacgaggcagagaagggaatttgttgctccagctgcaactccgacatcaggaaggcctgcataatcatcattcccttagcgtggatattcccgccaagttcggccttgcgctcaatatcgttaaattcgccatcgccgatatgcacaacacagctaattcgcgacggttcgccaaaggcgcgcggatgcccgggaaactcaatgacggaaagcgcattgatttgtccaacgcgttcgccttcggtttcaatcaggatctgctcttgcagaatctcatcctgcatccgctccgccagaaagccttctcgccattcgcgtcgggcaagcatcaggctgagcgcttctgcgccgcaggtatcgccttcgcataaaggcgacgcctccttaaactggcgggctatccacagtgggcaaagaggcagcgtatcctgttcgccggtatagcgcacagcctcgcgtatcaggacgggccaggcgtccggtgccggagggggcaaattatcgcgtaaagcgatacgcgtcacccattgacaccacagggtcatagcttctgcgtccgctatctgtaaattgtcttcaaattcactgtagatagcctgttccgcgagctccggttccatctcctgaaaatcagccagtgattcacgttcgccaaccagaatcaccttcagtttgagcggcattgatggcacggagaccggtaatggacgcgactcgtcaaaggccacccagtcaaaacgctcgcggctaacgatggctttcagacgcatccacagtaacggctgcgccagaagggttcgtaaggaaataatcagcacgccgccgttcgcctgatgaaccagtcccggctgcaggataatgtcgccgttatactgccgcaggcaaccaaagagctgttcggcttcgacccagtccgcgctgacgacttgtgtgacggtggcaaagttgtcttgcgcattctgcgcggcgcggtaatgaacagtatgcccggaaacgtcataatgtccgccggttaattgtccggcatcggtttgcagagcgcggacggcatctgaaagtaaagtgagatactcttgctcttcaggcgctttagtcagcataaaagaggatgatgcccacggctgtataagttgctcaagcgcaaattgcagtcgtggctgagtatcactgagtaaggtgtcgttttcgtcagtcgcgtgtggctgtgcaaatatctcctgatagctttcgctatccggaaccagatcacgccatgcaagtttcgtaatggtcaaagttgaggttttttagtctgttgtaaaaggggggattatagcctaacccgtcacgctgcacacgcggaaagcgaatgcaaagtaatatgaagacgtgtaaccattcacaggttcgagattcttttcttcagatggctaaaaaactgatattctgataacagttacacggtaacgttgggatcgcaatgaaatatcaacaacttgaaaatcttgaaagcggttggaaatggaaatatctggtgaaaaagcaccgcgaaggggagttgatcacccgctacgtggaagccagtgctgcccaggaagccgtcaatttgttgttggccctcgaaaatgaaccggtgcgggtaaatgtctggatagacaggcatatgaatcctgccttgcttaatcggatgaaacaaaccattcgggcaagacgcaaacgacacttcaatgcggaacatcagcatacgcgcaaaaaatctatcgatttagagtttatggtctggcagcgtctggcgggccttgcgcagcgacgcggtaaaacattatccgaaacgatagtgcaactgatagaagacgcggagcataaagagaaatatgccacgcaaatgaccacgttaaagcaggatttacaggcgttattaggcaagaagtaacgctgaaaggcgttgtcacccagaccagagcaaaaaaccccgcgacgcggggttttttatcagacggaaacttaagcctgcggctgagttaccacgtctttaacgcctttaacttcgatctctacgcgacgatccggagccaggcaatcgatcagggcagcgcgaggtttcacgttgtcacaggtgttgccggtaaccgggttagattcgcccataccacgtgcggagattttgtcagacggaatacctttggagatcaggtaatcaacaacagactgagcacgtttctcggacagaccctggttgtaagcgtcagaaccgatacggtcagtgaagcccagaacgacaacggaaccgtctttcggatccaggttgctcagctggctgtacagctgatccagagcctgctggccttccggcttcagggtagatttgttgaagttgaacagtacgtcagacttcagagtgaagtgcttggtctgtacttccggagccggagccggtgccggagctactaccggagcagcttcttgctggccgaaacggtaggaaacacctacgctcagcaggccgttgtccggacgggtgccgatggtgttggcatcaccgatgttgttagtccactggtattccagacgggttgcgatttcaggggtgatggcatactcgataccgcccgcgaataccggggaaacgccggtgtcgtggtctttagtagacgggccgccagggacgttagacttggtgtctgcacgccataccataccacccagacgggtataaacgtccagatcgtcagtgattggataacccagtttagcggtcaactgaacgccctgagctttataagcgccattgatgttgtcgcctttgtacggcatacggcctaaccagtcgtagcccatttcaaagccaacatacgggttaacctggtaaccaccaaaagcacctgcgcccagttggttttcatgagtcgggccatcattgtgaatgaagccggtgtcatggtactgagaccagcccagtttagcaccagcgtaccaggtgttatctttcggagcggcctgcgctacggtagcgaaaccagccagtgccactgcaatcgcgatagctgtctttttcattttttgcgcctcgttatcatccaaaatacgccatgaatatctccaacgagataacacggttaaatccttcaccgggggatctgctcaatagttactctaccgatatctacggcttatgctgagcacccctggcgatgtaaagtctacaacgtagttggaaacttacaagtgtgaactccgtcagacatgtgaaaaaaacatgacggatatacacatcatttaacagtttcagatgataaatcgtacagcaaaaattgcggaaaccgcttctgacaagcgttctcgcaaaaaaaacgttagcactcaaaggagatacgttcgcgtaaaaaaaagtccaggataaatcctaattttacttaatgatacaaattagagtgaatttttagcccggaatgctgtctcctggataaagcgtgcgcacgtacagggcgcatgataaaccctaccgcattacctaccttcgctgcttcaaccaggctggcatgttcttcttctgtcagttcttcagtcatccaaccaattaccacgctgtaatttcctgtacgcaaagcgcggatcatcgactccagcgtatgacgaggcgcaagctggctaatttgcatcactttcgttaatggcaaacctgaagactgtacccattcacggctgagcttttgctgcggcgtgagccagagctgccagcgtgattgttggcctaactgacggagtaaaggcaaaagcaggagttgcgccatcatgggctggtcttcgtggtagacaacttcactgaccagtcctgccgcggcattttccgtagcggtgcgcgcagcgttgtgggtagtggtaggaaatgacgaagaacgatttgcataacctgaagtgtacataatcaatccagccctgtgagttactgtatattcatacagtacccctgtggcgatgaaagatcaactctattttcggaaactgtctcgcaatttttattcttagtggcgtcaaaaataaaaatcatcttgctcgcggagtataagttgcctattttcgtcattaacggatccgttactgcaaatcattcttttactttatgatttaaaaggaattttatgagagcactctcttatgacaggatctataaatcgcaagaatatttggcctctttggggacgatccagtatcgatctttattcggtagctatagtctgaccgtggaggataccgtctttgcgatggtggctaatggcgagctttatctccgcgcctgtgaagaaagcgtaccctactgtgtgaagcatccccccgcctggctcatgtttatgaaatgtggacgtcccgttatgctcaactattaccgggtggatgaaagcctgtggcgcgatcagcagcagctggtacgtttatcgaagtattctcttgacgcggcaatgaaggaaaaacacagccgtattttacagcacagactcaaagatcttcccaatatgaccttccatctggaaacattgctcaatgagtcagggataaaggacgaaaatatgttacgcatactgggcgcgaaaatgtgctggctaaggttgcgacaaagcaatcccttgctgacggtgaaagttttgtatgccctggaaggcgcaattgtcggcgtacatgaagcggcgctcccggcgagtcgtcgccaggagcttgccgactgggctcattcgcttacggctgggtaattaatgtagaagtcggcggtgaaatttgccgttgcaagcgtccaatctcgggcagtaaggcaatgagcaaaccaatttgttgaacaaccagaggttctttgctgtccggacgtgtttccagtgactgaactcgctgctttaaaccctccagcgcctggtgtacgcgctgttcgtcttcaggttgatgatgaagcgcatcatcaacgtagcagaccgcgtcatccagaagccccaacacgtccggattactgagcttttcgcggtgcgcgccgagggcggagatatagctggtaaaagtgtgattgaggcaaagcagcctgaacgccgcctcccgggtttcagccgtgacgtcgggttcgctcgacatattagaaaccacggatgccagttctgcatcgcggttgtgcgcgtcgcgtctggcaatgcgataggccaggcggttatcccgtccctggtgatattgctcaaggatcgcatcaaggtagcggcaattagcatcggtggcgcgctggagtacccggggaaggttgcgaaagcgccagtccggccaaataaagctgaccgcagcccaggcgatagcgcagccaattaacgtgtcgacgacgcgcggtaacgctacctcgaagccttcgcccaggaggttaaagcagagtaataccagcagggtgatgaacatcgttgcatgggcatactgcacattacggaatgcgaagaaaagcacgccggtaatcaccagcagaactaactgtccttcaagcgaaggaacaaaccataaaatcggcaggccgatagcaacgcctaccaacgtgccgataatcctgagcgcaaggcgatggcgggtcgcgttatagttaggctggcaaacaaacaggctggtgagcaatatccagtacccgtggcgcatcccggtaatttggatgagagcataaccgatgcacaataccagcgacatgcgtaccgcatggcgaaagagagcggactccggggtaaaattacggctcagacgcagccagatgtcgctaaacccgtgcaggctatcatcagccaactggttttctgactcattgcgcggcattgcctgggcctgctccgactcgatcgtcgccagttgcgcatcaatggcgcgtaggttggttaataagaatccaagcgtattcagcagctctaaagaagcgccgctggcgcgcatacgttcaagcgcggcgtcaatgtgggtaaagacgcgttcaaaacgcggatcatgctggtacggcgtacgcagtaagatacagcgcgccagctgcgtacaggcctgcgcctgcatcgacatcagacgctgaaagcggaacatgacgtcgctatggcgaaaataatcgcgcagtgtctggtattgaatatgcgaagaactggcgcgttcatgaatatcctgcgccacaaaatagtaatggagggtgcggcgcgtaccgcgttgaccgcgatcgccgcgcaggcgactcaataacgacactttcgtttggttcagcgtcgccattaactgcccgttcgctaacgctaaatcatagagcggcgcctggctttcatcttcaatatcaggatcaaacagacgtgatttcagttccagatagtgcgctaactgttcgtaactgcgtgccagattatcctgcaacggacggatcggaaatagcagatgcccggttagcgtcagtaggttataccatactgcgcctgccagcaggagcagtggttgctgataccagtgatcgtataaagaggtacccagcatcgtatagatggcaatgagtaacgcgccgaacgcgatggtggcatagcgttgccccagtcctcccaacagaataaacccgctggtggataacgttaagcccaacgcaaatagccacggccagggaaagagcagctccacagaagccgacgcgataaaaaagcaaattaaggtaatgattaaattacgcaagcgtccggcaaggcgatcgtcgagatcggttagcgccgcggcaaccataccgagcgtgagcgggatggtcagtttgacgtcgcccagccaccagggcagggcggtggtgccgcacagagcgataaaaatgcggatgtaatacagccaggtactgttccaggtataacggcgaatcaacggacttaacataaaggctatttgtcccgatcattcaaaacggcggcgcgcgttagcttctcgcgcggcgcgagcggtttctacagagacgacgcggcgaccgacaggccaaagcgcaatcgcggcaattttaaagttcgcaataccgacaggtatcccgatgatagtgacacactgagcgataccggaggcaatgtgcatcaggcatagccaccagccgaaaaaaagtaaccagaaaatattcagcaaggtaccgccagtattcattaatacgcttttcgccgccggattaagttcgtcaacgtgaatggcttcattaccgtaagggaacagggacagtttggttatctcccagcaggagcgggtcaacggcagggtaaaaataagcacaatactgacaagcgtcgccagcagccaggccagcgtagtggcaaagccgcccagtacaaagtttaaaatattcagaacggtacgcataaaccctcagttcattccggttttctatcactgcgggcaattgtaacgtttttttagactggagcacgttttctctggcggttacactgataagcacatctttacgtctggattcgctgagtcatggaactgaaagcaacttctcttggaaaacgtctggcgcaacacccgtatgatcgtgccgagatcctcaacgctggggtgaaagtgtctggcgacaggcatgaatatcttattccattcaatcagttattggcgattcactgtaagcgtgggctggtatggggcgagctggagtttgtcctgccggaggataaagtcgtgcgtttgcacggtaccgagtggtcggaaacccagcaattccatcgctatctggacgcgcactggcgtcgctggagccaggagatgagtgatgtcgccgcgcaggcattacaggagcaatgggcgcgtattagtgagcgaacgggcggaaaccaatggcttacccgtgaacgcgttcgggggctggaacacgaaattcgccagacgtttgccgccttgccgctgccggtctcacgtctggaggagtttgctcactgtcgcgagatatggcgtaagtgtctggcatggttacaggatagcgagggaagtcggcagcagcataatcaggcgtatgctgatgccatgctggaagcgcatgccgacttttttacgcagatagaatcctctccgcttaatccttcccaggccagggcggtggttaacggcgaatcatcgttactggtactggcgggcgcgggaagcggtaagacctcggtgctggtggcgcgcgcgggttggctgttggcgcgcggacaagccgatgcggggcaaattcttttactggcgtttggtcgcaaggcggcagaagagatggatgagcgtatccgcgagcgcttacatacggaagagattactgcccgtacgttccattcgctggcgctgtatattattcagcaaggcagtaaaaaagcgccggttgtcagtaagctggaaagtgacgccaccgcgcggcatcagctatttctgcgcacctggcgtcagcagtgtagcgagaaaaaagcgcaggccaaaggctggcgtcagtggctggaagaggagatgcagtgggtagtgccggaaggtaatttctgggacgatgagacattgcagcggcgtctggcccctcgcctggatcgttgggtcagtttgatgcgtatgcacggcggcgcgcaggcagaaatgatcgctggcgcgccagaggagtgccgcgagctgtttggcaaacgcattaagctgatggcgccgctgctaaaggcctggaaaagcgcgttgaaagcggaaaatgccgttgatttctccgggctgatccatcaggcaatggtgatcctcgaaaaagggcgttttatcagcccgtggaagcatattctggtcgatgaatttcaggatatttccccgcaacgggcggcgctgttagaggcgctgcgcaagcagaatagccagactacgctgtttgccgttggcgatgactggcaggcgatttaccgttttagcggggcgcagctctccttaacgacggcgtttcatcagacgttcggcgagggcgagcattgccacctggacaccacgtaccgctttaacagtcggattggcgatattgccaatcgctttgtacagcagaatccgcaccagcttaaaaaaccgttaaatagtctgaccccaggcgataaaaaagcggtgacgttattggatgaaagccagttggacgcgttactggataaattatccggctatgcgaaggaagatgaacgtatcctggtgctggcgcgctatcaccatctgaaacccgcgagtctacaaaaagcggcgactcgctggccgaagttacagatagacttcatgactatccatgccagcaaaggccaacaggccgattacgtgattcttgtcggattgcaggagggtaacgacggtttccccgccccggcgcgagaatccattatggaaagtgcgcttcttcctcaggttgaggattttccggacgctgaagagcggcgtttgttatatgtggcgttgacgcgcgcgcgtgcgcgggtctggctgctttttaataaagataatccctcgcgctttgtggaggcgcttaaacagctggatgtgccggtggcgaggaagccctaaagcgcgggcggtacagcatcccgcccgcgtagcggttatttcaggcgctcggccagataacgcgcataatccggaataagaatatctacagcgtcattaaaatgcggggactggatgataaagtccgccgttgagacgttagtggcgacagggatattccatacggtggccagacgcagtagcgctttgacatcggggtcgtgcggtaccgcgttaagcgggtcccagaagaaaatcaacacgtcgattttcccttctgaaatgagtgcgccaacctgctggtcgccgcccatcgggccgctcagcatcgcattaacgtccataccggttgcgcgctggatcagattccccgtggtgccggttgcataaagaacgtgtttttccagcaacggctgatggcgttccacccagttcattaacatctgtttgcagtggtcgtgagcaaccaacgcgatatgtttgcgcgtcggcaaggtgcgagtcgtcagttccataattcgattccgtagttaacctgtctacagattactggaagcgcttgatgctgcaagagaaagagaaaaaaattgcgcgctgggacaactcatatcaagagggcggctgtttttccgcccattgcagaaaatgatggcgtgtctgcgggtcggccagtcggaaccaatatttcagccgctgttctgtcagagtttgtgattgcggcggtacggtatcaagctctgagacgtcggaaagtaatgtgctgtcgtctgccatcatcgtggcgaactgaggaagcgaggcgcgtttcgccgatttattataacgctcggtctctatttcataatcgaccactttagccgtagaagtaatggccagaatatcgagttttaccggaatgggcatggcgtcgccgtccaaaagcgccagacgcggcgccgcgttaaaatgcgaggcttcgcgctcgttttccagccgcgggagctggaaattgacctgacttatcagttgggtatcgaaacttatcaccagcggcggagaaatataaagccgctcttcattaccgggcaggcggatggttttttccacccggaaaacgagttgatgcggcccgttttccagttcaatgctctctgcgccgcgtaataaagagctggacacctttttgccgtccagcaccagcagatcaacctcattagacaaacggagcgttgtggcaaaaacagtcaccggcaaacagagagcaaggaaggtggctagcgcgccggttttcataaggttctcctgtccaaaggccgtctggctaataatgtatcgaaatttttcttagatcatgtttactaacatatagacatattttggcgttttgctctcatacatcggtatgggatgaatggttgctatgtcaggtttgtcgtacactttgcaaaacagccaggagaaagatgatgaaagagaccgatattgctgatgttttgacgtccactcgcactatcgcgctggtaggtgcgagcgataaacccgatcgtccaagttatcgggtaatgaaatacctgcttgaacagggctaccatgtgattccggttgcgccaaaagtcgcgggtaagacattgctggggcaacaggggtatgacacgctggcggacattcccgaaaaagtcgatatggtggatgtttttcgcaactctgaagctgcatggggcgtcgcgcaggaagctatcgccatcggcgcaaaaacgctatggctacagcttggcgtgatcaacgaacaggcggcggtgctggcgcgggatgcaggcatgaccgtggtgatggatcgctgcccggcgattgagatccctcgcctggggctggcgaaataaaagtttaaatggccggatatcgctctccggccttttacatacaatcagttacgtagtcgcggcgcctgaagctgcttgcgaatggtacgcgccagttcatccatcgatggctgttctggatgctcgtcccgcatttcgcttcgcaactgggcctcggccagataagtatgcactggctgaccatcatcatcttccattaccacgtggtaccacggagcggcgcgaagttcgtcgttaaccgccagttcatcaggcgacggctcatcaagcgaatattccgggtcgatatcgacgaccactccgaggtaacctaacagggaatggcggacctgttggccgataccgaatttgctggctatcatagtcacctcccgggaaatagataccctttatatgaggatactattccacttttcaagttacatgacgcgacaggcaaaccctttcagatacagcccttccgggtaggtggcgatcaccgggtgatcggcggcctgacggaactgctctataaattgtacatcacgaccggcatctattgcggcatcggcaatgattttctgaaataaatcgctggtcatcagtccggagcaagagaatgtcagcagtatgccgcccggattgagcagttgaatcgctaacatgttaatgtctttatagccccggcaggcgcccattaactggcttttattttcaacgaatttgggcgggtccatgatgatgacgtcgaatttttcgccgtgttcacggtaagcgcgcagcaacttaaacacgtcgtcgcgcacgaattcggctttgctcaagtccagttggttcagttcaacgttttgcctggcgatatccagcgcatcctgtgaggtatccacgctgacaacctggcgacaaccgcccattaacgccgacacggcaaaaccgccggtataagagaagcagttcagtacccgctgattttccacgtagcggcgcgtcgccagacgactgtcgcgctgatcaagataataaccggttttgtggccgccctggatatcgaccagcaatttcataccgtgttcttcaattggcaaaagcgcaggcggcagttcgccagtgaccggaccttgcgtcagcgccatcccttcttttttccgcacggcgacgtcgctgcgatcgtaaatagcgcaatccggatcgcatgtttgcagcgcactaattaatgcggcgcgttgatattcggccccggcgctgagcagttgcagcaccaaaaaatgaccaaaacgatcgatagtgacgccaggcaggccatcggactcaccggcgatcagacgatagctatccaggccgtcttttttcgccagccagtcgcgccactgctgcgcctggcgcaggcggcgggtgaaaaacgcaatatcaatggattctgctttatcaaatgtccagacgcgcgcgcggatctgggaggctggtgaccaggcgccgcgtgctaaccactttccctgatggtcgacgatatcgatagtttcaccgaggttggctttgccttccagacgggatacggcgccggaaaagacccatgggtggcggcggagtaaagatttttctcgccctttgctgaggactaaacggggatattgcggaaatgtagattcagtcatgcggagtaacctctcacaaacagtgacgcgggccggatgatagttccagcctgggaccgtgaaaacgaaatggcgcgtagggtagcacagatgagaggggcaatcaccagcgtatggtggtgagcgtttctgcacaaaatagaatcgtaaaggcacagtttcttcagcggacgctttttatagtgttatttctttacatgaagaaggaaatacaatgaaaacagtcttctctttgaccgcagccgcaatgatggcattgagtggcggcgtatctgccgcgtcggcgtttagcctcagtagcgcggatattccggcggattttcgtttaacgcaacagcacgtctttaaaggatttggttgtagcggagaaaatatttcgccgcagctgagctggcgcaatccgcctgccggaaccaaaagctacgctattaccgtcttcgatcctgatgcgcccaccggaagcggctggtggcactggacgatggtgaatattcctgcgcagattcacgacctgccgacgggggctgataaaaaaacgttacccgctggagtggtgcagggacggaatgatttcggttatgctggttttggcggcgcctgtccgccgccgggcgataagcctcatcgctatcagtttactgtgtgggcgctgaatacggcaacactgccgctcgacagtgagtcgagtggcgcgttggtagggtttatgcttaacgcgcatgtgattgcgaaagcaaaattcacggccacatacggaagataaaacagaggacggcacggtgcaggagatgcatattcgacatcaggatcttacgacggcagaggtgcgttccagtcatctgcaccgtttgcatcgtgttacgcttttttccgccgctatctgccatattacgcagggcagtaaagtcatcattcaggatgatagccgccttgtcgccgggccgggcgagttgattattattccggcgaacacgccgctggagattattaatcagcctgcgcagaacggttttcgctccgacctgttgttactttcaccggagattattgctcgctttaaaacgatgtacgttcaggattatccaccggcaaacctgacatcgctgtgtaccccgatgagccgtagcctgacatttatgtgggagaacgtgttggatgctgtgcgccagggcttacctgtcgggctacaggaacatcaggcgatggggttactgttagcgcttttgcatgatggcgcggcgggaccgctgcttattgaacggcgttacaccctcacggagcaggtgcggcaactgattatgctctcacctgctaagctatggacagcccaggagatagcccgccgtcttgctatgggaacatcgacgctgcgtcggcgtttgcagcgcgaatcgcagagttatcggcaaattattgaagaggtacgcatgtcctgcgcgctttctcaactgcaatcgacgacgctgccgatcggcgaaatagcgctacggtgcggctacctgtcggggtcgcgatttacggccagattccgccaacattatgggtgtctgcctagtcaggtacgttaagtatgtcctgtatgcgtcttcaccgttgattatgaaaggagaaccatcatgtcgaacgtctgcattatcgcctgggtttatggtcgcgttcagggcgtcgggtttcgctataccacgcagcatgaggcgcagcggctggggttaaccggctatgcgaagaatatggatgacggaagcgtagaagtggtggcctgtggcgacgcggcgcaggtagaaaagctcatcaagtggctgaaagagggcgggccgcgctctgctcgtgtggacaaaatcctcactgaaccgcacagccctcgcgagacgttaacaggcttcagtattcggtattagatacattttaccggcttgggcagaccggcgattttggtcgcttgctttgccgggcctttcgggaacagacgatacagatagcggctgttgcctttttcttcgccgaacttattcgccatcgcttttaccagcattcggatggcgggagaggtattaaactccaggtaaaattcgcgcacgaagcgcacgacttcccagtgttccgcagagagctcaatgccttcattggcggcgatagcgactgccagcgtttcactccactgcgtcgtctctttcagatagccttcgctatcagtactgatttctttaccttcaaagatcaacataacgtttcactgcgtaatcaacacggacggcagtgtagcaaaaaataaagccctgcataagcagggctggaagaggggaatgtcgattagtcgcggctggcgaagcccagaatgctgagcaggctgacaaagatgttgtacagcgaaacgtacagactgacggtcgcacgaatatagttggtttcaccgccgtgaatgatgttactggtttcatacaggatagcgcccgaggaaatcaggataaacaccgcgctaatcgccaagtgcaatgcaggcagttgcaggaaaatattcgccaccataccaatcagcacgacgacgatcccggccattaacataccgcccaggaaagacatatccttacgggtggtcagaacgtaagcggagcagcagaaaaatactaacgcggtaccacccagcgccaggccaatgacatcgcccatgcctgctgacagataggcgttaagaatcgggcccaggatatacccgaggaagccggtaaacgcaaaagcagacaggataccgaccggcttattggcggttttataggtcaggaacatcagcccatacataccgaccagcgtcagaatcaggccgggggagggcagcatcagtaccgtactggctgtcgcggtaattgcggagaaagccagcgtcaggctcaacagaaaataggtgttgcgcagtactttgtgcgtactcagtagcgagctacgatcacgcgatgatgtaatgatacgatccattagtcactctcttatgacagatgtaattaataaaggagaataataaaaacagtcactgtcacccagtggttttacccatctttacgcattcgtttacgtttagtttcctttagagatttcaggtgattaccgtcgttaaaacggtctgctcatgcctggcgctacgccataaaacaggcggctgcgccagccacgcgttaccgataaaaaattgataatcacagcggtaaaacagtggggacgatcaacacgtattaagcccgtttttgtgttgaagaaatggtcaatgtgccgctatttcaggcaattaacgaaaatttgcctgtttttcacgcaaacgaacacattcggtctttacatgacgcaccgggatgtttatagtgcgcctcattccggaagtgtggccgagcggttgaaggcaccggtcttgaaaaccggcgacccgaaagggttccagagttcgaatctctgcgcttccgccagattaaacaaggggttaccgaaaggtaacccctttgttttttgggtgcttagaatatagttagaaaatactgctagaacatttcccgaaaaaacggactacgtgggtttttagtttcttttcgtttcctgatgtgtctatttattgaagatgtagaccattctgggaggtgaaggatgccccatctctttcagaataatgttggtatattcgacaacagggcctcttggatgattttcttctttatcctgaagatgggtcagtgcatgtacaacttcatgaataaatgaacgttttgtgtcaaaaagttgtcttccttcgttactttcataatgttcggtatatgaatcatcagaatcgtccagattgagacaaataactttcctgccttctgaaagtttgaagtgttcctgagccacggtagtttcaaaggcttcgcctgcccccagtagccagcgctgctccacatcatgtagttctttttcatatgcgtaactcatcagtctgcggaatgtttcgctttgggtatacgcattttgaagtacggaggatagttcatcgtagcattcgtcataagtgtcgtcatcaatttctgtatcagggtctattccacccgcgcctgagataaggtattccaccacacactctggctccagacggaattcactgtttatggcaaggctgtcatgagcaaggcgtagccgtgaggggtttggtgcatgttcgggaatatcggggaaaacaggtgtatctgcggtatttaatccatatgtggatactccgctttgaggtattaatctgtaggtgaccggaagcataacttcttatttcctgactacaattatgaattatttaaattaaacaataatagtgtttttagttaatgtgccacatacagataacgctatgattcagacaaagtcaacaagtaatacgctgaaaatgttatttataatgaaacttaggagcggggttatttaataaaacaaggggcttctgtttgaatacttcttgtttataaaatccctttatctcgactaaaatatcggatgggggaaaagagttctatcattgtaatccgggagtggagtaggggtatgttgactacctgtcagatcggctcctgttaatgatttcgctaaagttagagctatcttatctaatttcgcaccatttagtttggtgtcagttaagtctgagccgaatagaattgcagcggttaagtttacaccggacatgttagcgcaagtcaggtttgcgtgagtcaggtttgctttagtcatgtttgaacccattagatttacagcgtgtagatttgcacaacacaaatttgcaccgactaaatttacattagatagagttgtttcacggaaatctgcatcagaagcatctatgtctgacaaatcttccccctggaaatctttatgagccagatttactccgcgcaggttcagaaaaccatcctcggttataagtgaatcaggctgttgtatattatgtttactcatcagctttaacattcggcatacattccaaaatctctcactatcaactttatccgttacagtttttccatttttgttcacttcaataatgaccatgggagccgtattttcggatgctgctccacatgacagacatatagtacacccgttgacatcctccagaaatattttattaccatcgaagaaagcatctttatttacatataataatgatgtggtcagttttccaattacctcctgaaagcatctttcattgcttcttcttactccaccacaggtaaaaaaattgacaaaccattccagtataccgcgtggtgaagttgcacttttcattgcttctttcgtaccggtaccggccgcatgcaaatatcttaatatattttctggggacgcgttagttattggcattttgattccttcttatggaagtgagtcgattccttataggtgtgagtcaagtcacatttatacaagaaataataaaaaaagatataaggtgatttttgtatttagagctttggttgagtatgagtaggtgtctggcatctgacaagaggcgatgatatctgccataacggtgaagcagaagtaatatcacccgtgaataataagattatccttgctattgacttccttcatttccagcatagcttacgcttcatcatcattgaataaacaattaagtttgttgagcgaaaatttacctaaagaaaaaataataagctttaatattttttgcagcatttcaacttatagcagaataaatgtgcgtagatggcgtaaaaacctgatgagcaggaatacttacacactaaaaatgctcccgcaaacagagcaaaatgagagagatgaacgtttgccccttacatttccaccaaagattctggtcttgtctcttgtaaagggcatacgtatcgcgttttatctcattaagaaagtatgttgacgtattaaattatgcataatgctctttcaattgcttcacgtttgaaatgaataattcaaaaccagtgagcgcctcttcttcggtactggtttgtggcaagcgataaagcgccactaaagcagtattgtctgcgtcagcgccgatagtgacggcgctggtgtagttcagacgtaaaaaatgctgcaaagtcaggatgtcgtcaggcaatggcataaagggacagcacatttccagtgtatgatcggattcattaaaataaacctgtatcccatcatcaatgataagcagtggctcatcttctggcgcatccaggcctaacgcgtcatataaacgatttaatagactttccatatagttacctcaagactcaagatgtgattaatgaagaaatgccttttactgactgccaaatattttcatccccaactcgtttttgataggaaagattgagcacctctggcgataaatttttcattactttgtttcccgccccgcccgtattttgtttctgaatctccaggttaccgctattcagtaatactttttggaaaattttctgtccaccgctatccggaagactaccaggcgcacttaacatatgggtctgatgtaaagaaatgtgctctcgcttgatttctgaatccatcattcctgtacgatctttgccgcttttacaattccaggcgggtaccgcgtcaatttcatgggctaacatggcaaggcgttgtgcgagtttatagggttcgccgccatctttatgatgttggttatttttccatatatccttaatctggcgcgctaatgtattgacgacctcataattatccgggtattgcgccagccattcgccaacccagccacctggtctggcttcagggcgtaaatcattgcctaataactgatgtagcgcctcggcattatagctatccgatgccttaaggccaaagccgagcttgagcgccagctcattaacacccacattaaatgcggcgacgtccggttttatttttaccgtctgtagatcgccatctttattgcggatttttaaatgaatcatttttcccggctgggtcaacgattgccatgcgcgcatttggtcctcgaccatcgttccctctttgccgaaaatattcgacgcggtgagtaacccgacggataccagtttcaggcttaccgcctcgcccgctaaggctttgttaagcaactcaggtttactaaaaagtgccgcagttaatacttctttggctttgttttcagcgccgacgtgacgcagaagcggatctttttcatgatagggggaaagcacgccatgacgtatcccgcaaaaaagcgttttatctttaccgtcctcatgcacactcaccgtggacatccacaaattattggcgtgatgaatattcttggtatcccaactgcatacgccctttccctcataagcactgggaaagatatcttttgcgccgattttcatctctgctgcagggagctgcgtgttggtatagtgatgcccgttatgcgtgagtgtattttttatggtttgccagggctggttattaagctgcttgacctgagcatctctaaacgctactgccgcaaagcgatgagcttcttttgcaggtaagccatcctgctgctgagtgcgtgctgcaataagttcgataagatttttcttcaatgcttttgccgcggcttcttcttgttttgttgctggccggtccgctttaactttggctaactccatttggtttgccattgacgttagaaccgggtcttgtttacccagaacggttgccgcgacggtaagaagatcgcgctgtaagttatagaggttatgcagcgagtggttagacgtcttctgatgctgtagataattcccccatgtcgcgccaggttctcgcaggacaataatttccgggcgagcgtcgggcgctttagccggcgctttgccctggcctgagagaatctgcattccgttgtataaggttttttgtaggcttttaaaagcctcctgggtttttagtgaagctgagtgatagaagctctgtatttgcatagcgtttttaatattcctgaataggggagtgggaacattcaatagggttaacaaccctttaaaaggatgtgacttttatgcaccaggaactttaaaaaaatgtcctttttaatgaggaaacgcttctgatcaggcggggaggcatcctgacgtccatacgtagtggcgatcatgggggagatcggtacatcaaatgttcataaaatctacaaacttcacaatttatggcacaacttttattgaaaacccaccttcttgactcagatcaaattcaccgatttactcctgcgtaaagtaacggcgttacatcaaatgttatacaggtgtgtgtatgccagcaaagccccggacaagtaagaccgtgacgaagaatattcgtttttcctattccatgcttgaacagatagaattcgcgttgaaatctgaaaagacgcggaatttttcagcatgggtaaaagaggcctgtcgggaaaagttatgtaacacgggacataagctgtagttatcgtcttatgtaagagggggcggccattttgaaaagaacaacgtgcttatatacctcctgggtttttgccgcttttgtctctctgctgatatttgcctggagtgtcataaactatcctctctatgaatccataataattattgtcttttatatctggctaattctggtaccgctttatcttattgtgtatgagtggctaatagattgtcattaaatttatggttgcgtacttgaaaagtgatatttcatatctgtacggtaagtcattgtcgtaataatattattggtcaggcgacgggcgagcgtctgcgcattttgcatcgttttatcttcaaaattttgcagtaagcgttgcgcttctttcggatgcgacgcatataatctcagatagctctgctccatcttatactgctgcttagctgtttgctgttcaaatgttttccaggcgtgttgcacatctggcgcaaacgcattgtagtcctgcataaccagcgtttgcagcgtgcggaatgtccagtaggtagagtcgttgctcgcccgatcggttcctttatcatctccgggttgataatgacgcatcccctgataataggggagatagacgctaagagatggcattccataggcgatgtattctacgttgccgatagcctgcggtaatttcggtctgacctgtaaaatatgcgactcctgggtacgaaaaacggatatgggtcgccatggttcttgtggattatgactggcataagggtcgtgcgacgttccctgatagtgatttcgtaacgcgttttttactgccgccacgctaatttttgttattggtgttaaaaaaacaggaaatgtttccccttcgctaacggccgtatccagatgcggattaaactggtgttgtagcgtccagacgcgcggataattataggtggtatcgtttttgttatcctgcgaataggcttgatgaaagtcgaattcgccgcgggccggatcatataatccctgctttttcgcaaagcttactaacgttggtgacgccatataattcgcgttatcattcggatcgtaatggcgtaaacgtccctgattggcggaaacgaaatagctatctgccggaagtcgtactgccagccattgatgaccgcttcccgtctccagataccatatctctttgctatcaataaacgcgacgccgaaaccttcgccagcgcctttttgttcaataatgtctcccagtaatttggcgccctgacgcgccgattgcgccactggcaggatcacggactcaatggcgtcttccgtgattcctgtttttgtcacgtaaggatcggcagccagcgccgctctgccgttataaatggtttccgttgcgctcattccgacgcccgccgaattgaaaccggcttcacccatggcgttatcgttagtatcaaagtcatgaatcgccgtatagcgcatcgctgtctccggaagcggccagctaaaattgttgcgatgtgctttatactcgccttgttgatgaaacgcgacgggatgaataaccttatgcttggcgttatttgccgagccatcttcgttgcgcgcgataatgaaggagccgtcagccgaagcctgattgcctaccaaaagggtagtacaggcgatgactttacccatacccagcagcgtaacggcgaatgcaagatactttttcataaaggttcccactgaataacgcgttatgggatgaattgaccctggattggaaaccgagaaagtgatcgagccagcaatattctttgccggcatcctttattttctctttattgaggttgtattgataaccacagccctgtggcagggaaggggaacagaacctgtactgaccttagctatcaccgctatcgggcagacgaaccgaaaagatattatgttcatcggcatagcggtaagatgccgaaccaccgtgtaatagagcaatcgcgttaactaacgataaccccaggccgaaaccggcagtgtggcgggcattatctcctcgccaaaaacgccggaaaagcttatccgcatcggctgggtggctgcccggattagcgacccgaatttctgcaacgttatcatcataagcgctttcaatacgtatcacggcgttttcatcagaataacggatggcattcgtcagcaggtttgagagcactctttgtaataatatttcgtcagcccataccgttccctgacattgatttataaaacagatgcgcttctcctcggcaagggggctaagataatccagcatattttcgaccagcgcattgagcgaaacaggctgtttttttaccgctatattctggtgctccgcgcgtgccagaaagagaatattttctgtcagtcgcgacagtccctccagctcttcaatattatcgacaagggcttgttgatactcttcggcgctgcgttcctgactcagcatcacctgattcttccccagtaaaatattaaccggcgtgcgcagctcatgcgccagatcgtcggcaaattggttcaggcgttcaaaatcgtcggaaagcttctggcgcatggtatttagcgcttgtccaagcggcctgagctcaacgggtaacgcctgttccgccaacggctggcgaagtgtgccgctatctgtcgccgcggtgagtcggctgagcgacgtaatggcccgcagcccgtttctgatgactaatggactgagcgccgaacagacgaggatcgcgataaggctcatcagcaaactgttgcggcgatattgcgtcagcatttgccgcctttccgtcgccagcctggcaatagtaagggtcagcgggtcatcgccgcttctggcgtttactcgtaccgcggtaagttccgtgccttgtaccgcctggcgaaataaggtttcgcgggtgatgtttttagccagcggaatctcgttaaagcgttggtcggggatgccgctatgattaatcgcaacattgtggcctgttgctgaatggatcaataagatatcctgcttcgtatccaccatccgattgaaatagagcggcagattttccggcctggcgccatccagtaacagttgctgcatttgcgccgcccgatttattagcgtcatatcatcacgatacgttaattctttgctcagcgcgttatagagcgtccagctaatgccggtacaggcgaggataaggatggcgataaaagaaattgtcaggcgcagcgtcattgataacttaaccattctgcgacgtttccgcctgtaatcgataacccatcccccggacggtcataatgagcttcttttcaaatggatcgtctactttggcgcgcagccgacgaatcgcgacatcaacggtgttggtttcactatcaaagttaattccccaaacttcgctggcgatcgcggttcggggcacgatttctcctgcccgggacgccagtaaccagaggagcaggaattctttgcgggtcagggaaatcggtttgccatttcgtgacaccgattgctttgtggcatccatgtccagaccattgatcgtcagtcgggtaaagacagggacatgctgtctgagttgagctctcacccgggccagcagttcggcgaaggaaaaaggcttaacaaggtaatcattagcgcccgcctcaagacctttgacgcgatcctcaaccgagtcgcgcgccgtcaggcaaataacaggggactgatgcgcagtgcgtaacgcgcgtaaaacctgccatccatcaagccccggcagcataatatcaagaataatcaatgaataatgttcctgaagggccaggtgtaatccgtctcgtccatcacaggcataatcaaccacatagcctgcttccgtgagtccctgacgtacccactcaatggttttctggttatcttcaatcaataaaatcttcatcaacgcagtatgccataggcttgttagcgaatccgtaaatctccaacaagatgacataattgtcatgtccgtgtaaggttaatcctggacgcgccagatatattttcctgcatcaataccgtaaaggagtgaagcatgaaacgacatatactggctaccgtgatagcatctcttgttgcagccccggcaatggcgctggccgctggcaacaatattctcagcgtacatattctcgatcagcaaacaggcaaaccggcgcccggcgtggaggtggtactggagcagaaaaaggataacggatggacgcaattaaacaccgggcataccgaccaggatggacgtattaaagcactgtggcccgaaaaagctgccgcgccgggggattatcgcgttatttttaaaaccggccagtattttgaaagtaaaaaactggatacgtttttcccggagattcccgtcgagtttcatatcagcaaaacgaatgagcactatcatgtgccgctgttattaagtcagtatggttattcaacctatcgcgggagctaatttagagcctatcccattagggctattttacttgccattttggacctgggcagtgctcgccaaaacgcgttagcgttttgaacgccgctagcggcggcccgaagggcgagcgtagcgagtcaaacctcacgtactacgtgtacgctccggtttttgcgcgctgtccgtgtccaaactggctgcgccaataacacctggtgggataggctcttagattgtattaatcgccgcgatttatggcgagcaaacatcgcggcgggaataaaaatcttcagcgtatcgactcttctcccacaagcggtggttatcccgcttgtgggcatgagtgacggttaaacaggcgcttccatctcaagtctgaccggatgaaaacggcgtttgaaataaatcaggccatgcccatcctggctaagaataatatttttgatcgccaccagatacaccagatgcgtgccaatggtttgtacctcgctgatctcgccttcaagaccggccagcgcgccgttaagtaccggctggcccagcggcccgttttgccaacatggctggtgaaaacgctcttccatcgccatccccgtcataccggcaaagtggcgcgccatcagctcctgctcatggttaagtacattaatgcacagcttgccgttgccctgaaagacggggttcatggcgctattggcattaatacataccatcacggagggcggcgtatcggtgacggaacagaccgctgttgcggtgataccgcagcgtccggcgtgacccgccgtggttacgatgttgaccgctgccgccagacttgccatcgcatcgcgaaaacgcagacgttgttcatctacttgcatgagaacctcctgccgcgttatttcagcagcttatccagttgattgatgtcgtcgttattgtgcaaatgcgaaaccgtccagccattctgatcgtattcggagaggcagcgatcaaccattgccatcatcttatccatattgccggagctctgggcctgacgcaggcactgcagacgaatttcatcctggctgcccgagtagttaatctcgtacagctcatggcgaccgccaaactcgctgccgatggcatcccacatcaatttaagaattttgatacgttcaacatggtccattccgttagagccgcgtacgtatttcgccaggtactggtcgatttgcggattattcagatcgcgggcgctggaaggcaggtaaatcaggccgctggtaacgttacgttcaataatatttttaattttcgcgtaggccattggggccatgacacgataggtttgcagcgcggcgtggtccggtagccaggcgccgtttacccacggggttgcttcagaacacatagaatcgctcaatgcccagaacatattgcgccacgccacgacttctccgagatcggcctgcacgccccggaactctacggtacccgtacattcgagcgattttttcagcagcgcggtaatgaaatcaagtttaaccgccagacgaacacaggcttgcagtggatacatacgggcaaagccgccttccatcgtccagcgacggcaacgatcgaaatcacggtaaatcaacacgttttcccacgggatcaacaccttgtccatcaccagaatggcatcgttttcatcaaagcggctggagagtggataatcaaacggcgagcccgtcgcgcccgcgaccatttcatacgaggcgcgcgaaataagttttacgccttcggcatccattggcgcgacaaacatcagagcgaaatccgggttttcgcccatcacctgggctgagccgaaaccaatcatgttgtagtgagtcagggcggagttagtggcgacgactttcgccccgctgacaataatcccggcgtccgtctctttctccagcttgatatagacgtctttcacttcgtcggcaggtttgtggcggtcaatgggcgggttgacgattgcatggttaaagtacaggccggtctcctgaatacgggtgtaccagttgcgggcgttctgctcaaactggccgtagaaggctgggttagcgcccagggcgcaaccaaaggcggctttgtaatccggtgtgcgtcccatccagccgtaactcaggcgtgaccactcggcgatagcatcacgctgttggcgcagatcgtctgcgcttttcgcaacgcggaaaaatttatgcgtataaccgccgctgccggtatcggtattccagcatagggtatcttgcatcgacggtttatgtaatgcgtcatacagttgtgcgacagaggctgcggcattgcggaatgccggatgtgtcgtaacatctttaacgcgttcgccgtaaatataaatttcccgcccgtcctgcaggctttttaaatactcttcgcccgttaacggacgcttgttatcagtacgaaaatcttcaggtttcattgcggcctcttcctcattaatcggaatgttttgttaataatatgtttcttatttgttgtttaattgaataggcagaagcgtaaactgtgaagagactttcaggacaacggcgggtacttttcagatgaacgtcgaagaagaagagtaaaatgcgatcgccgtcaacgttgtaagcgggaggggattcccgtgtcggcggcgtgggaaggtaagaatactatgcttccgcttcgctatcaggatgctggcgtcccagggcaataagatcgtccagcagcagcatcaattgctgtgttttttcgggcgtgaaatcggcctcaatttttcgataagcctcttctacctggcttcgggcacgggcgtacaacgtttgtccctgctccgtcaacatgacatataacttacgctgatcgttaaccggcttgagtcgcaacaccagtccgtctcgctccatgcgcgtcaatattccggtcagacttggacgcaaaatgcaggtacgaaaggccagctcgtgaaaatccatagaggggctatcggccaggattcgcacaatgcgccattgctggtcggtcagattgtggcttttaacgatggggcggaaataggtcattgccgcttcgcgcgcctgaagcaaggcgatggttaatgaatcatgcataagcgtttctcttttgcagaattattaatacctgaataatcgtgtttaccgatgtgagctatgacatctgttttatgtccaaagtttaacagaaacaaggggttttatttaactctttgatatgtatgcatttaataataaatttgtgaaaatattgttaatcacatcacaaatactttacttcagcttgctaaatgtacagcgaaagcataaatctaatcattaatatattaatgaaatcacagcccgttgaatcggcctgaggagtttatgtatgaagggtactgttttcgccgttgcgttaaaccatcgcagtcagcttgatgcctggcaagaggctttctctcagcctccctataatgcgccgcctaaaaccgcagtgtggttcatcaaaccgcgtaatacggtgattcgtcacggcgaacccattccttatccgcagggagaaaaggtactgagcggcgcgacagtggcgctcattgtggggaaaaccgccagccggatacgccctgaagcggcggcggactatatcgccgggtatgcgctggctaacgaggtcagcctgccggaagagagcttttatcgcccggcgattaaagcgaaatgtcgcgatggcttttgcccgctgggtgaaatggcaccgctgagtgatgtggataacctcaccattatcacggaaatcaacggacgagaagcggaccactggaatactgccgatttacagcgtagcgccgcacaactacttagcgcgttaagtgagttcgctacgcttaaccctggcgatgcgatcttactcggtacgccgcagaatcgcgttgcgctgcgtcccggcgatcgggtgcgtattctggcgaaaggtttacccgcgctggaaaatccggttgtcgcagaagatgaattcgcccgccaccagacgtttacgtggccgctgtcagcgacgggtacgttatttgcgctggggttgaactacgccgatcacgccagcgagctggcatttacgccgccgaaagagccgctggtatttatcaaagcgccaaacacctttaccgaacatcaccaaacgtcggtgcgcccgaacaacgtcgaatatatgcactacgaagccgagttggtcgtggtgattggcaaaacggcgcgtaaggtgagcgaagccgaagccatggagtatgtggccggttacaccgtctgtaacgactacgcgatccgcgactatctggaaaactactaccgtccgaatctgcgggtaaaaagccgcgacggcctgacgccgataggcccgtggattgtggataaagaggcggtttctgatccgcacaacttgacgttacgcacctttgttaacggtgagctgcgccaggaagggacgaccgccgatctgatcttcagcatcccgttcctgatttcttatctgagcgaatttatgacgttgcaaccgggcgacatgattgccaccggtacgccgaaagggctttccgatgtggtgccgggggatgaagttgtcgtggaagtagaaggcgtgggccgcctggttaaccgaatcgtcagtgaggagagcgcaaaatgaagaaaataaatcattggattaacggcaaaaacgttgcaggtaatgactacttccagaccactaacccggcgaccggtgacgtgctggcggaagtagcctccggcggtgaagcagaagtgaaccaggctgtcgcggcggcaaaagaggcgttcccgaaatgggccaacctaccgatgaaagagcgcgcgcgcctgatgcgccgccttggcgacctgattgaccagaacgtaccggaaatcgcggcgatggaaaccgccgacaccggtctgcctattcaccagactaaaaacgtgctgatcccgcgcgcctcgcataacttcgaattcttcgccgaagtgtgccagcagatgaacggcaagacctatccggttgacgataaaatgctcaattatacgctggtgcagcccgtcggcgtctgcgcgctggtgtcgccgtggaacgtgccgtttatgaccgcgacctggaaagtcgcgccgtgcctggcgctgggcaacaccgcggtgctcaaaatgtccgagctgtcgccgttgactgccgacaggttgggcgagttggcgctggaggcaggaattccggcaggcgtgctgaacgtggtgcagggctacggcgcgacggcgggcgatgcgctggtacgccaccatgacgtgcgtgcggtgtcgtttaccggcggtaccgccaccggtcgcaatatcatgaaaaatgccggcctgaaaaaatactcgatggagctgggcggcaaatcgccggtgctgatttttgaagatgccgacattgagcgcgcgctggacgccgcgctgttcaccatcttctcgatcaacggcgaacgctgcaccgccgggtcgcgcatctttatccagcagagcatttaccctgagttcgtgaagcgctttgccgaacgcgcgaatcgcctgcgtgtcggcgatccgaccgacccgaacactcaggtcggcgcgctgattagccaacagcactgggaaaaagtctctggctatattcgcctcggcattgaagagggcgcaacgctgctggcgggcggtgcggaaaaacccactgacctgcctgcgcatctgaaaggcggtaacttcctgcgcccaaccgtgctggccgatgtcgacaaccgtatgcgcgtcgcgcaggaagagatctttgggcccgttgcctgtctgctgccattcaaagacgaagcggaagggttacgcctggcgaacgacgtcgaatacggtctggcctcttatatctggacccaggacgtgagcaaagtattgcgcctggcgcgtgggattgaagccggcatggtcttcgtcaacacccagaacgtccgcgacctgcgccagccgttcggcggcgtgaaagcctccggtaccgggcgcgaaggcggcgaatatagcttcgaagtgtttgcggaaatgaaaaacgtctgcatctcaatgggcgaccatcctatcccaaaatggggagtttgatatgggcaagttagcgttagcagcaaaaattacccacgtgccgtcgatgtatctttctgaactgccgggaaaaaatcacggttgtcgtcaggcagccattgatgggcatattgaaattggcaagcgttgccgcgaaatgggcgttgacaccattatcgtattcgacacccactggctggtgaatagcgcttaccacattaattgtgccgaccatttccagggcgtctataccagcaacgaattgccacactttattcgcgacatgacctatgactatgacggcaatccggagctcggccacctgatcgccgacgaggcagtcaaactgggcgtgcgcgctaaagcgcataacatcccgagcctgaagctggagtatggcacgctggtaccgatgcgctacatgaacagcgacaagcacttcaaagtggtctccatctcggcgttctgcactgtgcatgattttgccgacagccgcagactgggcgaagccattctcaaggcgattgagaaatatgacggtaccgtagcggtattcgccagtggttctctgtcgcaccgttttattgacgaccaacgggcggaagaggggatgaacagctacacccgcgagttcgatcatcaaatggacgagcgtgtggtcaagctgtggcgcgaaggaaaattcaaggagttttgcaccatgttgccggagtacgccgactactgctacggcgaaggcaacatgcacgacacggtcatgctgctgggaatgctgggttgggacaaatacgacggcaaggtggagttcatcaccgacctgttcgccagctccggtaccggccaggtaaacgctgttttcccgctgcctgcgtaaggggtgtttatgccgcactttattgctgaatgtactgaaaatattcgcgagcaggctgatttacccggcctgttcagcaaggtaaacgaggcgctggccgccagcgggattttccccatcggcggtatccgcagtcgcgcccactggctggatacctggcagatggctgacggtaagcatgattatgcgtttgtgcatatgacgctgaaaatcggtaccgggcgcagcctggagagccgtcaggaagtcggcgaaatgctgtttgggctgattaaagcccacttcgccgacctgatggagaaccgctatctggcgctgtcgtttgagattgccgagctacatccgacgctcaattacaaacaaaacaacgtacacgcgttatttaaatagcacactctttcgcccggtggcgctgcgctgaccgggcctacaaaaaaacgatgcacgaagcaataccgaaccgtaggccgggtaagacgcacccgcgtcgccacccggcacagcagcaccgaatgacgtaacaggaaacactatgctcgataaacagacccataccctgatcgcccagcgacttaatcaggctgaaaaacagcgtgaacaaattcgcgcagtgtcgctggattatcccaacatcactattgaagatgcctatgccgtacagcgtgaatgggtcaatatcaagatcgccgaagggcgcacgctcaaaggccacaaaatcggcctgacctcaaaagcgatgcaggccagctcgcaaatcagcgaaccggattacggcgcgctgcttgacgatatgttcttccatgacggcggcgatatccccaccgaccgttttatcgtcccgcgtattgaagtggagctggcgttcgtgctggcgaaaccgctgcgcggccctcactgcacgctgttcgacgtctacaacgccacggattatgtgattccggcgctggaactgattgacgcccgcagccacaacatcgacccggaaacccagcgcccgcgcaaagtgttcgacaccatttccgacaacgccgccaacgccggggtgatcctcggtggtcgccccatcaaaccagacgagctggatctgcgctggatctccgcgctgctctatcgcaacggcgtgatcgaagaaaccggcgtcgccgcaggcgtgctgaatcatccggccaacggcgtggcgtggctggcgaacaagcttgccccctacgatgtccagcttgaagccgggcagatcatcctcggcggctcgttcacccgcccggtgccggcgagcaagggcgacaccttccatgtcgattacggcaacatgggcgcgatcagttgccggtttgtgtaaggaagaaacgatgaaaaatgctttcaaagacgcgttaaaagcggggcgcccgcaaatcggtttgtggctggggcttgccaacagttacagcgctgaactgttagcgggcgccggcttcgactggctactgatcgacggtgaacacgcgccaaacaacgtgcagacggtgttgacccagttgcaggcgattgcgccttatcccagccagccggtggtgcgtccgtcatggaacgatccggtacagattaagcaactgctcgacgtcggcgcgcaaacgctgctgataccgatggtgcagaatgccgatgaagcgcgaaacgccgtagcggctacgcgttatccgcctgccggtattcgcggcgtgggcagcgcgctggcgcgggcatcgcgctggaaccgcattccggactatctccaccaggccaacgacgccatgtgtgtactggtgcagattgaaacgcgtgaggcgatgagcaatctggcgtcaattctcgacgtggatggcattgacggcgtgtttattggtccggcggatctcagcgccgatatgggctttgccggcaatccgcagcacccggaagtgcaggcggcgattgagaacgccatcgtgcagatacgcgcggcggggaaagcgccggggattctgatggccaatgaagcactggcgaaacgttatctggaactgggggcgctatttgtcgccgtcggcgttgacaccacgctgctggcgcgcggagcggaggcgctggcggcgcgctttggcgcagaaaaaaaactgtccggtgcgtccggcgtctattaagcctggcccggtaagcgcagcgctaccgggcaaccgtagtaccctacaaaattcccatcagaggaaaaaaaaatgagcgacacatcatctgcacttccggaaagccccgagtctgtccgttcgcacaacgcgctcagcacgggtcaacaaaccgtcataaataaactgttccgccgactgatcgtatttttattcgtgttgtttatcttctcgtttttagaccgtatcaacatcggttttgccgggttgacgatggggcaggatctggggttaagcgccaccatgtttggccttgccacgacgctgttttacgccacctacgtcattttcggcattcccagcaacgtgatgttgagcattgtcggcgcccgccgctggattgcgaccattatggtgctatggggcattgcatctaccgccacgatgttcgcggtgggaccgaaaagcctgtatgtgctgcgaatgctggtgggcattaccgaagcgggctttttgccaggaatactgctctatttaacctactggttcccggcatttttccgcgcccgcgccaacgcattatttatgattgccatgccggccactaccgcgttggggtcgattgtctccggctatattttatcgctggacggcatattcaatctgcatggatggcagtggttattcctgttggaaggatttccgtcagttttgttaggcattatggtctggttttacctggatgataccccggcaaaagccaaatggctgacggcagaggataaaaaatgtttgcaggagatgatggataatgaccgcctgacgctggttcagccggagggggccatcagccataacgccatgcagcagcgtagtctgtggcgcgaagtattcacgccaattgtactgatgtatacgttggcctatttttgccttaccaatacgcttagcgccattagtatctggacgccgcaaatcctgaaaagttttaatgaaggcagcagcaatatcaccatcggcctgctggcggcgatcccgcagatttgtactattctgggcatgatttactggagccgccattcggacaaacatcaggaacgtaaacatcacacggcgttgccgttcctgtttgccgccgcgggctggctgctggcgtcggcgaccgaccataacctgatccagctcctggggatcgtgatggcatccacgggttcctttagcgcgatggcgatcttctggaccacgccggatcagtcgatcagtttacgcgccagggcgataggcattgcggtcatcaatgccaccggcaatattggctccgcgctcagcccgtttatgattggctggctaaaagatatcaccggtagcttcaatagcggcctctggtttgtcgcttctctgttagtcgtcggcgccgccattatctggcttattcccatgaaagcatcgcgtccgcgcgccaccccttgaggagaaactatgtgccaacgtgcgatcgccaatattgatatcagcaaagagtatgacgaaagcatgggcagtaacgatgtgcattatcagtcgtttgctcgtatggcggatttctttggtcgtgatatgcaggcgcatcgccacgaccagttttttcaaatgcactttcttgataccgggcagattgagctacagctcgacgatcatcgctattcggtgcaggcgccgctatttgtgctaacgccgccctcggtgccgcatgcttttattaccgaatcggatagcgatggtcatgttctgacggtacgcgaagagctggtttggccgctgctggaagtgctttatcccggcaccagagaggccttcggcctgccgggaatctgtctgtcgctggcggataaacccaacgagctggcggcgctcaaacattactggcagctaattgagcgggagtccacggaacaactggctggctgcgaacataccctggtgctactggcgcaggcggtatttaccttgctgttgcgtaatgcgaagctggacgatcacgccgcaaccgggatgcgcggtgaactgaaactttttcagcgctttaccctgttaattgacaaccacttccatcagcactggacggtgcccgattatgcctgtgagttgcatattaccgaatctcgtttgaccgatatttgccgccgttttgctaatcgcccgcctaaacgcctgatttttgatcggcaattacgcgaggcgaaacgactgctgcttttttccgacaatgctgtcaacgagatcgcctggcaattaggttttaaagatccggcttatttcgcccgtttctttaatcgccttgctggctgttctccttcgcagtttcgccaacgtgaagttccctcttttctcaactaagaagagtaaaaacatgatgaaaaaaagcgtcgctatgctggcggtttgtatgctggcgcaaagccaccttgccattgctgccagtgctcctgcgcctcaagagatcaacattgttttactgggcaccaaaggcgggccttctttgctcaatacagccagactaccgcaagcgacagcgctcactatcggcgataaaatatggctgatagatgccggctacggcgccagtctgcaactggtgaaaaacggcattccactgcgcaacatcaatactattttgctcacccatctgcacagcgaccacatactggattatccttccttgctgatgaatgcctgggcaagtggcctgaaagaccataccatacaggtgtatggcccgccgggaacccaggcgatgacgaaggctagctggaaggtctttgacagggatatcacgctacgcatggaagaagaggggaaacccgatccgcgcaacctggttaaggcgaccgatattggtcagggcgtcatctataaagatgaactggttacaataagcgcgctgaaagtgcctcattcccctttcccggacggtgaagcgtttgcttaccgttttgatacccagggtaagcgaatcgtcttctctggcgatacgtcctggtttccgccgcttgcaacgtttgcccaaggggcggatatcctggtacatgaggcggtacatgtcccctcggtagcaaaactggctaatagtattggcaacggaaaaacgctggctgaagcgattgcgtcgcatcacaccacgattgaagatgtcggtaagattgctcgcgaggcccacgtgaaaaaactggtgttaagtcatctggtgcctgcgacggttgcggatgacgtctggcaacaggaagccatgaaaaattacccgggccctgtcattgtcggtcatgacaatatgacgataagcgtaccgtaagtatcagagcagggataaacccacgggctgacatgatgtcagcccgttatgcttttggcgatcagcatgacgcgcagagcttttgtctaaaacattattttttctaaacactacttgctgatttttatgcacaataaaggtaagatgattgctctggtgaaatatcactaaataagaatgtcacggatggaatttatacagtgttaaaagcaatgcgtttctttgtctgccggccatcagtaatatcctctgtaccggctcctcgttgccaaagtgaaggttagattaaacgaatcaaaaaatatccgaactgtacaatttttatatcaaacatatttaactgcaaaatactgcaaacgtgcgcgaatacacttaatcagtagtatggctaatgcatactttatttcctaaactttcttattatctatttgaatatttctggttaaaccaaatggacaaacggataccagacactcgaaaggataactgcaggcttctggtttaggattgcagttaccaggacagtggctattttctttaagcgatttccatagaacaggattaaacctggtaacgttgtaaacagtaacgggataaagtttatcgtttattaagacccccttattaaaggggatgataatgctacctggaggcatgtaaacatctgcctgataccataaggtcaatctaagattttttaggctatgtatgcatgagaacgacactccggtagagggacttataactgtatcaacgaccttccattccattacagaaaccttttaagtgaaatagtcaatggtgtaaattacattttccgtaagcctattcaggatagatgaaaatctgagaaacataactcgttgaaaacgatcgttttttattgaccactctatttatattgattttttaataagttatttattttatgctcttattttgtttacattctattacatttttgtattttagacgtggtgtaaatattgggcggtagtggatgttataacgctgaattattaaactgtaagtgactgttgtatttcttatttataaataccgcaacctgtaagcgcagcggtacattttacccggcattgacagggagaaggtacgtatcaaccagagagtacaaaacagtgaaagaatatattcttcaggcaataaatgatcgctaacgtgtaaaaataaccgacgtatctaaaaaatgtgaacgtgtggctggtctttatttaaacgatgatcttcgcaatggcgcattaatggctgacattggcggttcgttgatcgggttgtgcgcggtgaaaggctatatttcttccgttgggggaagtatgtcagaggcattctggtattataccgggtgcatgtaaatccggggtgggcagaaagcccaccctcggtttattgcctttatcgtggattagggatgcgagataaagcgagaaaggcgttgcagtagtaaccggttttcttcgcgcagccgtgaattctcttccagcagcgttaacgcgaccgcgatcccaggccagtcgagcgccagctcctcacgtaagcgtagcgcgcgttgtaccacgctcgctgcgcgatcgtcgaattgccagtcggcgttatcgtcttcgtaaggctcaattacgccaagtccgacgatttcgtttagctcctcttccgtcacgccggtgtgcaaacaaaattcggtgatggtaaaggtgacagtgatgttagccattatgctttcccccattgctggcgtgggtcaaaggacgactgcgcgtccgccagttgttgccacagggcagctgttttctcgtcaggtttcggcggcataacgattttgatgatggcatagagatcgccagtgtgctttttactggctaatccttttcctttgatacgcagccgctgacctgcctggctaccggggggaatggtcagcaaaatacgctctttaagcgttggcacagacaccttagcgccgagcgccgcctcccatggggcaagcggaaggacgacttccagatcctgattgacaatatcaaagagcggatgcggggcaatatggataacgagccataaatcgccattaggtccgccgttttcccccggcgtgccctggcctttcagtctgattcgttgcccgttgctgacgccagccgggattttcacattcaatgtcttgggaatttcccgctccaccaggccgaacgcgttataaacggggacggaatagctaatcgtacgctggtgctcttccagcgtttcttccaggaataccgccacttcaatttcgatatcatgaccgcgtgcggcgtggcggtgatgcgaatggcgaccgtgctgaccaaaaatagacgagaaaatatcatcaaaatcttcagcgttatacggctggccttcgtgttgctggaactggcgattaaattgtggatcgttacggtgttgccataactggtcatactcggcgcgccgttgctcatcactcagcacttcccatgcttcagcaacctctttgaaacgggcttcggcatcgggttctttgctgacatctggatggtacttgcgggccagtcggcgataggcggtcttaatcgtcttgagatcgtccgtcggtttcacgcccataatggcgtaataatccttaagttccatagcatcatctcgctaaatcaatacatacagaagggaccccaaaaaggtttctccactaagtgtagggtaaacctgaaaagtgcgtatgaaaacaccagttatatcattagtaagaataaattacgttgttcgactatcagaaggttgcgcagcgcgccgacataactttacaggggaaaggttgccaaaaccgcgccagtggctaagataactcgcgttaaacagtgagggcgcaatggcgaaacaacaacggatgggctggtggtttctttgccttgcatgtgtcgtggtaatggtttgtaccgcgcaacgcatggcgggcctgcacgccttgcagatgcaggcgacggcctctgctgcggtgatcagcgctccctcctcgacagatgacggctcgccggtcaccccctgcgaattaagcgccaagtcgctgctggcggcgcctccggtactctttgaaggcgctatccttgcgctttgtctactgctttccttactggcgcctgtccgggtcatgcgcctgccgttttcgcctccacgggctatttcgccgcccacattacgggtacatctacgattttgtgtcttccgtgaatgacagaccggttattgctaacggttaattactcattcacggagaaaaaatatgatgattttattcaggcggatactgttctgcctgttatggctttggctgcccgtctcctgggcggcggaaagcggctggctgcgttcgcccgataacgaccatgccagcatacggctacgtgccgatacgtccgctaacggtgagacccggctgttgcttgacgtcaaactggaaaacggctggaaaacctactggcgcgcgccgggggaagggggcgtggcgccctctatcgcctggaaaggtgacatgcctgaggtaagctggttctggccaaccccctcgcgctttgatgtggcgaatatcaccacccagggatatcacgacgaggtgacctttccgatgatcgtgcgcggtacgccgcccgcgaccttgagcggcgtgttgacgttatcaacctgcagcaatgtttgtctgttgaccgattaccccttttccgtgacggccactgtgcagaatgccgattttgcccatgactatgcgcgggcgatgggtaaagttccgctccgcagtggactaacggactcgcttgacgtcggctatcgcccgggagaactggtggtcactgctacgcgagcggcgggctggtcatcgcccgggctctatcttgacaccatagatgacgtcgattttgcgaagcctcgcctgcgcgtagagggcgacaggttacaggcgacggtgccggtgacggacagttggggcgaaaaggcgcccgatttgcgcaacaaatcgctgaccctcgtgttagccgatggcgctatcgcccaggagagcacgcaaaccattggcgctgcgccagcgcaaacgccggacaatgcggcgctacctttctggcaagttgtaatgatggcgctgatcggcggactgattcttaatttaatgccctgcgtactgccggttctgggcatgaaacttggctctattttattggtagaggaaaaaagccgctctcacatcaggcgacaatttttggcttcggtcgccggtatcattgcgtcatttatggcgctggcggcgtttatgaccctccttcgcctgtcaaaccatgcgctggcttggggagtccagttccagaatgtatggtttattggttttatggcgctggtgatgttgttgtttagcgccagcctgttcgggctttttgagttcaggcttccctcatctatgaccacgaaactggccacttacggcggtaacggtatgtcgggacatttctggcagggggcattcgccacgctgctggcgacgccttgtagcgcgccgtttctgggcacggcggtcgcggtggcgctcacggcgtcgttgccgacgctgtgggggctgttccttgcgctaggcctggggatgagcgcgccgtggctactggtcgcgatacgaccagggcttgcgctacgtttaccgcgccccgggcgttggatgaatgtcctgcgtaggatcctcggtctgatgatgctggggtcggctatctggctggcgacgttactcctgccgcatttcggcttcactgcgtcaaagagcgcgcaagacacggttcagtggcaaccgttgagtgaacaggcaatccagtcggcgctggcgcagcataagcgggtatttgtcgatgtcactgcggactggtgtattacctgtaaagtgaataaatacaacgtcctgcaaaaagaggatgtgcaggccgccttgcaacaaccggatgttgtggcgctgcggggagactggacgctgccgtccgatgccattacagattttctgaaaacgcgtggccaggtcgccgtgccgtttaatcaggtatatggccccggcttgccggaaggggaggcactgcccactttgctgacccgcgatgcggtattacaaacgttgaaaaaagcgaaaggaataacccaatgaaatacatgattgttttactgctggcgctgttttcaacgctgagcatcgcgcaagaaaccgctccttttacgcccgatcaggaaaagcagattgaaaatctgatccatgcggcgttgtttaacgatcctgccagcccgcggataggcgctaaacaccctaagctgacgctggtgaactttacggattacaactgcccgtactgcaaacagctcgatccgatgctggaaaagattgtgcagaaatatcctgacgttgcggtcattattaaaccgctgccattcaaaggagagagttccgtactggcggcgcgtattgcgctgaccacctggcgcgagcatccgcaacagttcctcgcgctacatgaaaaactcatgcaaaagcgcggttaccatacggatgacagtattaaacaggcccagcagaaagcaggggctacgccagtgactctggatgaaaaaagcatggaaacgatacgcactaatttgcagttggcaaggctggtcggcgtgcaaggaacgccagcgacgatcattggcgacgagctgattccgggcgcggtgccctgggatacgctggaagcggtggtgaaagaaaaactggcggctgccaatggcggctaaactgcggcgttggctgcgtgaagccgcggtttttctggcgctcctcatcgcgataatggtggtcatggacgtctggcgcgcgccgcaggcgcctccggcgtttgccgcgacaccgttacatacgctgacgggagagtcgacaactctggcgaccttgagcgaagaacgccccgtactgctctatttttgggccagctggtgcggggtatgccgctttactacgcctgcggtcgctcgcctggcggctgaaggggaaaacgtcatgaccgttgcgctccgctccggcgatgacgctgaggttgcccgctggctggcgcgcaagggcgttgacttcccggtcgtcaatgatgctaaaggcgccttatccgctggctgggaaatcagcgtgacaccaacgctggtggtggtttcacaaggtcgggttgtgttcaccaccagcggctggaccagctattggggcatgaagcttcggctgtggtgggcaaaaacgttctgaatatgcgccggggtttcccggcgctaacgcgtttactgtaagaaaaacccccgttttgcgaaatcgttcccggaaaaatgatccatttctgtcacactcagaacgatttgataacaacaagaggtcatagggatgaaaaaatcattactcgctgttgctgtggcaggggctgttttgttgtcatccgccgtacaggcgcagacaacgccggagggttatcaattacaacaggtgctgatgatgagccgccataatctgcgggcgccgctggcgaataatggcagcgtactggcgcagtcgacgccgaacgcctggccggcgtgggacgttcccggcgggcaactgacgacgaaaggcggcgtgctggaagtctatatgggacattacacacgtgaatggctggtcgcgcaggggctgataccgtcgggagaatgtccggcgcccgacacggtatatgcctatgcgaatagtttgcagcgcaccgtcgccaccgcgcaatttttcattaccggcgctttccccggctgtgatattcctgttcatcattaggaaaaaatgggcactatggaccctaccttcaatccggtgattaccgatgattccgccgcgttccggcaacaggccgtacaggcgatggaaaaggcgcgtagtcagctacatcttgatgagagttataaactgcttgagcagataacgcattatcaggactcgccgtcctgcaaagagaagcatcagtgttcgctaatcgacgcgaaagataccttcagtgcgaactatcagcaagagcctggcgtgcaggggccgctgaaagtagggaactcgctggtggatgcgtttaccctgcaatattacgaagggtttccgatggatcaggtcgcctggggcgggatccacaccgatcggcagtggaaggtgctgtcaaaactgaaaaacggctaccaggacagcctgtttacctcacccacggtggcacgcaatgtcgctgcgccgctggtgaaatatatcgataaggtgctggttgccgatcgcgttagcgcgccgaaggttaccgtgctggtggggcatgattccaatatcgcgtcgctgctgacggcgctggattttaaaccctatcagctccatgaccagtatgagagaacgccgattggcggtcagcttgtcttccaacgctggcatgacggcaacgctaaccgggatttgatgaaaatcgagtatgtctaccagagcgcccggcagttacgcaatgcggaagcgttaacgctcaaatcgcccgcgcaaagggtaaccctggaactgaaaggatgtccggtggatgcgaacggcttctgtccgctggataagttcgataacgtcatgaacactgctgcaaaatagccatatgcccccgcgcaggcgggggcgtttgtgttatacgtttttacgttcgatgatttgttcgccccagaagagcgagtctttgtccgttttctcaaaggctttgatcagcacctcatcgctaccttcttcccatattttttctgccagtttctcgtcatagtgagcgacttcaaaaatggcttcggcaatttccggcgacgtattacgcaggcttgcccattcgccgacgcggtgcgcttttgcttcttgagttggcattcgaatcctcctgttgaagattagccgttgagtttgactgccagaccggcgacgtattccccctgatagcgagcgatagagagttcctcctggcttggttgacgtgaaccgtcgcctccggcgatagtcgttgcgccgtaaggcgtgccgccgcgaacctgggagacgtcaaacagttcctgtgcggcatagcctatcgggacaatcaccatcccatgatgggcaagcgtagtccaggtcgaggtgatggtctgctcctggccaccgcccgttccggtagaactgaacacgctgccgagcttgccgtatagcgcgccggatgcccacagtccaccggtttgatccaggaaggtacgcatctggcctgacatattgccaaaccgggttggcgtaccaaaaataatggcatcgtaatccgccagctcctgtggggtggcaaccggtgcgttttgcgttttaccgccagcttttgcgaagatttcaggcggcattgtttctggcacacgctttataatgacctctgcgccgtcgactttctttgccccttccgccaccgcgtgcgccatggtttcaatgtgtccgtacatggaataatagagcaccagaatctttgccatttgtactactcctcagattaatcaggtgtgtagcgattcgctacgtctatttaaagatatgccctcctgtgaagagtgcaaatttcagcgccatttctttgatttataacaataattaatttggcgacctttgttgcaaaatgatacatttttaagcgctttgatttttccaagtataagaataacttatttatttctcattgttattattctgcatattcggcttctgatgttgcagaatatttcggtaagcggcctaccacggcgtttttcactatgcttaattttacgcggcgttactgatgatatcgttcatacgcggcgcgaggagatactcctcattacctatgcaatatgatgtctaatctatgacggaggtcagtaatggcaaaccatcgtggcggttccggtaattttgcggaagaccgcgaaagagcatcagaagcaggtcgtaaaggtggtcagcacagcgggggcaattttaagaatgacccgcagcgtgcatccgaagcaggcaaaaaagggggcaaaagcagtaaccgtaatagctagcctgcgtcacaacagcaagacgctgagcgtttcgcgctaaaaagcgtcatgcgccaccgccgccggatttccggcggtttttttgtttataagccggatttggtatgcttgcgtcctgacaaaaaggagagggcgcatgtcgcaacgcacagagaaaaaaatcgggaaacgctcgcaggccaccggtgcaaaacggcagcttatcttaactgccgcgcttgctgttttttcccagtatggcattcatggcgcgcgtcttgagcaggtcgccgagcgggcaggcgtctccaaaaccaatctgctttattattatccctcgaaagaggcgctgtatgtcgcggtaatgcgacagattctggatgtctggttggcgccgctcaaggcgtttcgcgcagaattttcccctctggaggccatcaaagagtatatccgtctcaagctggaggtttcgcgtgattatccgcaggcgtcgcggctcttctgcatggagatgctggcgggcgcgccgctcttaatggaggaactgaccggcgatctaaaagcgttgatagatgaaaaatccgcgctgattgccggatgggtgcacagcgggaaactggcgcccgtctccccgcaccatttgatcttcatgatttgggccgccacgcaacattacgccgattttgcccctcaggttgaggcggtaaccggcgcgacgcttcgcgatgaagcctttttcaaccaaacggtcgaaagcgttcagcgcattattattgaagggattcgcgtgcgttaaccggctggcggcagtgggcagctcaaatcaccctcttcacattgcagcagcgaggctaaaaacgcttcgcgttcgttcgttttatcggtcaggcactggctggcgatcatgggttgcacgctgccgccctccgtacctgagcgaatcagagcgcaatcggcgtcccgcagtgcaatccatgccacctgcgctttttgcaacagctcgcgctgcggcggttgcgcacgcttaatcgcgctttgataggtttcgttcagctttttatctgccgcctggtattgcgcggcggcgcagcgattcatttccagctgcgtactggcgctggcacactcatcggccaacgcctgactgctgaaccacaacgccgcgcaggtaaggaaaatttgtttcatacggtcctctgacgcgagtaaaaaggctccattgacggagccttaattaaccacagtattagccaattgtcatcaggctggcattaccgccagcggcggcagtgtttacgctcagcgaacgttcaatatagagccgttccagcagtatattgctttcgccgcgggcgaacccctgtaccgacactatcgcgccttcgcgggcggcgacggcttcgcgggcggcgacggcttcgcacacggttcgcagcttgtcggagtcgccgtggaaaatcaccgcgtcaaacggctgcgccatcagcgtttccgctttcgcaaactggacacgcgccgcaacggcggcggggagacgtttcgccagatcgcggtggaaggcgtcgtctgaccatagcgcctgactgccgacggcgagaacggcggcaagctgcgtcaacgcgtcctgttcgtcatcagccaggcataatacccgttcacgcggcaacagcgtccaggtattgcgctcgccggtcggtcccggtagcaggcgctgcgtgccggcctgcgccagatcggcgaattgtcggcagagcgtctgtagcgccgggcgatccgccgcccattgcgtcagagcggtcaacggcgcgagtagcgtggttttaagctgcgcatccaccgggtaacgcgcatcctgacgagtcagcgtcgtattgagcgcattgggcgggcggtgtgccagcaggcggtagagatagagcggtcctcccgcttttggcccggtgccggacaggccttcgccgccaaacggctggacgccgacgaccgcgcccaccatattacggttaacgtacaggttgccgacatgggcggaaccggtgacttgcgcaatggtttcatcaatacgggtatgtacgcccagcgttagcccgtagccggaagcgttaatctgttcgataagctccgccagttggttacggttataacgcacgacgtgcagcacgggcccgaagacctctttttccagttctgcgaagttttccagctcaataagcgtgggcataacaaacgtaccggtctgccattcctgcgcatcatcgctgttttcacgtgcggcctggaaaaccgggcggcctttggcgcgcatcgtctggatgtgacgttcaatgttggctttggcctcgctatcgatcaccggcccgatatcggtcgtcagacggcctggattccccatccgacactccgccatcgcgccgcgtaacattttcagcgtatgttcggcgatatcgtcctgcaaacacagcacgcggagcgcggaacagcgttgtccggcgctgtcgaaagaggaagccagcacatccacgaccacctgctcggtgagcgcggaagagtcgacaatcatagcgttcataccgccggtttccgcaatcaacggaatagggcggccctgggcgtcaagacgcgtggcgatgttgcgctgcaacaacgtcgcgacctccgtggaaccggtaaacatcacgccgcgtacacgcgcatcggcggtaagctgggcgccgacggtttctccccgtcccggcaacagttgcacgacgcccggcggtacgcccgcttccagcaaaatggcaatgccctgggcggcaatcagcgatgtctgctctgccggtttcgccagaacgctgttacctgccgccagcgcggcggcgatttggccggtgaaaatggccagcgggaagttccacggactgatgcagactaccggccctaacgggcgatgcgtttcgttatcgaaatcgtcacgcacttgaccggcataataatggaggaagtctaccgcttcgcgcacttcggcaatggcgttgctgaacgttttccccgcttcacgcaccaacaggccaatcaactgctgcatttggtcttccattaataccgccgcccgctgcaaaatggcggcgcgttcttgcggcggcgtcgcaaaccaaaccggcgcctgattgaccgcgttttgcaatgcctgttcaacctcgctttctgtcgcttcgcgtccccagccgacaatatctttcggttccgccgggttgataaccggcgtcatctcaccgtcggccaccggttgttccagcacaggtttggcctgccatttctgcatggcgttgcttaacagggcagaagaaagcgaggcgaggcgatgttcattcgctaaatcaagtccggcggagtttatccgaccttcgccgtacagatcgcgcggcagcggaattttcggatgcggtatgccagcctgaccttcctgctgcgccagtttttccacggcctcgaccgggtccgccaccagttcatcgagcggtagggtggcatcggcgatacggttgacaaaagaggtgttggcgccgttttccagcaggcgtcgtaccagataggccagcagggtttcgtgtgttcccaccggcgcgtaaatacggcagggacggttaagttttccgtccgccactttaccggtgacctgttcatacagcggttcgcccatgccgtgcaggcactggaattcgtactgacccggatagtaattttgcccggccagatgataaatcgccgccagtgtgtgagcgttatgggtcgcgaactgcgggtagatcagattagggacggcgagcagttttttcgcgcaggccagataagagacatcggtatacactttgcgagtataaaccggatagccctccagcccttccatttgcgcgcgtttgatttcgctatcccagtaggcgcctttcaccagacgaatcatcagccgccggcggctacgggaggccagatcgactaaataatcaatgaccagcgggcagcgtttctggtaagcctggatcacaaagccaatgccgttccagcccgccagttcgggttcgaagcagagtttttccagcagatcgagcgagatctccagacgatccgcctcttcggcgtcgatattgagaccgatatcatactggcgcgccagcagcgtcagtgatttcaggcgcggataaagctcctccattacccgatcgtattgcgcgcgactatagcgtggatgcagggcggacagcttaatcgagatgcctggcccttcgtaaataccgcgaccgttagacgctttgccgatggcatgaatcgcttgctggtaagagaccatataggcctgcgcatcggcggcggttaacgcggcttcgcccagcatatcgtaagaatagcggaaccctttctcttccagttttcgggcattcgccagcgcctgagcaatggtttcgccagtcacgaactgctcgcccattaaacgcatcgccatgtcgacgcctttgcggattaacggttcgccgctcttgccgataatgcggttcagcgagcgcgaaagattggcttcgttatgcgttgagaccagtcggccggtaaagagcagcccccaggtggcggcgtttacaaacagcgacgggctacggccaatatgcgactgccagttgccattactgattttgtcgcgaattaacgcatcgcgcgtagctttgtcgggaatacgcagcagcgcttccgccagacacatcagcgcaacgccttcttgcgaagagagggaaaactcctgcaacagcccttgcaccatacccgcgcgaccgctggcggatttttgattgcgcaatttctccgccagttgatacgccagtttatgcgtctgctcagcgacaggcggcgacaggcgcgcctgttccattagcattgacaccgcatcggtttccgggcggcgccaggcggcggtgatggcggcgcgagagacggattggggaagaatctgttcggcaaactccagaaagggctgatgcggctcatcctgcggcgcgaccggctcctcgctttcatttgccgcgccggcaaacagcgcaggtagctccggtagcgtatcgctattttccagcttgtccagatagctaaagattgcctgttttattaaccagtgcggcgtgcgatcgatacgcgacgcggccattttgatccgttcgcgcgtggcgtcgtccagcttaacccccatcgtggtggttcccataccctctactcctgttattcgctctatctgctaaccaatagttagcggaaaatatccactatgttgcaactttgtgcaaccgcgttaaatgtgacctgcgttgcaagcttaaaaatgaataaattgttaaaaaaagaaagagggagtctgacggggaaaaccatctggatttattttctctgcggtagttaacacttttaaaaggtgcaaccgcaaaaaatgtgagagagtgcaacctggagaaaaatagtatccctctgcaatcaaatttgatgtaaatggtgtgttaaatcgattgtgaataaccaccgcttccggcaggatacggtcgccctggtaaacataacacccttgccacgttccggcagggtacaaaacggcacgctacggtagtgccaataaataaatttggagaaccttgatggctattagcacaccgatgttggtgacattctgtgtctatatttttggcatgatattgattgggtttatcgcctggcgctcaaccaaaaactttgatgactatattcttggcggtcgcagcctggggccgtttgttacggctttatcagccggcgcgtcggatatgagcggctggctgttaatggggctgcctggcgctatctttctgtcggggatctctgaaagctggatcgccattggcctgacgttaggcgcatggattaactggaagctggtggccgggcgcctgcgcgtgcataccgaatttaacaataacgcgctcacgctaccggactattttaccggtcggtttgaagataagagccgagtcctgcgtattatttccgcgctggtcattctgctgtttttcactatctattgcgcatcaggtattgtcgctggggcacgactgttcgaaagcaccttcggtatgagctatgaaaccgcactgtgggcgggggccgcggcaaccattatttatacctttatcggcgggtttcttgccgttagctggacggataccgttcaggccagcctgatgatttttgcgttaatcctgacgccggtgatggttattgtcggcgtaggcggttttagcgagtcgctggaggtgatcaagcaaaagagcatcgagaatgtcgacatgctcaaggggctgaattttgtcgctattatttctctgatgggctggggactgggttacttcggtcagccgcatatcctggcgcgctttatggcggcggattcccatcacagtattgttcatgcgcgtcgtatcagtatgacctggatgattctgtgtctggcgggcgcggtggcggtgggcttctttggcattgcgtactttaacaataaccccgcgctggccggggcggtgaaccaaaactcagaacgcgtatttattgaactggcgcagatcctgtttaacccgtggattgccggtgttctgctgtctgctatcctggcggcggtgatgtcgacgttgagctgtcagttgctggtatgctccagcgcgattacagaagatttatataaggcttttctgcgtaaaagcgccagccagcaagagctggtatgggtagggcgagtgatggtgctggtggtagcgctgatcgccattgcgctggcggcgaaccccgataaccgtgtgctggggctggtgagctacgcctgggctggattcggcgcggcatttgggcctgttgtcctgttttctgtgatgtggtcgcgtatgacacgtaacggcgcgctggcgggaatgattattggcgcggtgacggttatcgtctggaaacaatatggctggctggatctgtatgagattatccctggcttcattttcggcagcctggggatcgtaatctttagcctgcttggcaaagcgccgacagcagcgatgcaggaacgctttgcaaaagcggacgcgcattatcattccgcgccgccgtcgaagctacaggcggaataaccgacatgtccgatagcattatcgccatcggacatattttaccaggcggcgttatacgcctgcctggtcctctgataagtcccgtaccgattgactgaagatgttcaggtaaatgaggacgctctctcaaactatttttagcccttgagcgccgttaacgcgggcgtaatacgtctcgagtaatcactaactggccatatatgaaatcgcctgttaatggtaccaatagccttgacgcaatagagtaatgacaaaaattaaaacgagtcagcgttaccggcgtaagtatgccgcacaaaattttgcataaataatgccgttttagcgatgggagagaggacacgttaattactccgttttaaccttttatatgttgaatattcaatgggttatgggtggttttaccattaatacccatagtagctaatgattatcttttttagtctcctgccaatgaaataattgtgtaatctttctgtaagagactgacaatgacgcaataatgtttggttaatgtttggtgaatatattgttgcattattgatgttttgtgttgtacttagtagtaatagcggtagttccccggcagtgatggtcactcactatggagatcgcgaatggtaatgtccgcaccaggacacattgtttacagtagttacaacaccctgtacggacattctctctccggtggtggtcttgtcatcttaaaagctctcatcatttctcttactgtccatacccatgacgtcatatgtggtgcgcgtagccgtgtgtggcgtcgtttcaaaaagcaagctaaggcttacaaggaagccaaccctcagatgtgtgtgcgcataatcgcgttcaagagaacgcgggtgatgtatacctacaactcaaggtgctatccatgggaagacaaaaagcagtgatcaaagctcgtcgtgaagcaaagcgtgtgttgagacgagattcgcgtagtcataagcaacgtgaagaagaatcggtcacgtcactggtacagatgggcggagtagaagccattggcatggcgcgcgatagtcgcgatacctcgcctgttaaggcgcgaaatgaagcacaggcgcattatctgaacgctatcgacagtaaacagcttatttttgcgaccggcgaagccggctgtggaaaaacatggatcagtgcggcaaaggcggcagaagcattgattcataaggacgtcgagaggatcattgtgacgcgtccggtattgcaggctgatgaagatcttggttttttgcccggtgatatcgctgaaaaatttgcgccttattttcgtcccgtctacgatgtcctgcttaaacggttgggcacgtcctttatgcaatattgtttgcgcccggaaatcggtaaggtagaaattgccccgttcgcctatatgcgtgggcgtacttttgaaaatgcggtcgtgatcctcgacgaggcgcaaaatgtgactgcggcgcaaatgaaaatgtttttgacgcgactaggcgaaaatgtcacggtcattgtcaatggcgatattacgcaatgcgacctgccgcgcggcgtgcgttccggattgagcgatgcgttggaacgctttgaagaagatgaaatggtagggattgtgcatttcaacaaagacgactgcgtgcgctcggcgctttgtcagcgaacgctccacgcatacagctaatatagcattgactttcagagcccgggagaccgggctttgttgtctataaagcgtccagcagactcatggacaaaaaaggaaaatgacgcctgtacgtgaagggaattattttgtcatgtccagggcattcattgtccgtaatttgctttctcgggcctgttccggcgaggactgtacaagaagggtatagagcaggtcaaagacgaaaagctgcgcggctttcgtaccgatcgagtcaccctgcaacattccttgccgattaccattgatcaggcaaaaatcggcctcttcacataatggagaacccagattatgggtaatggcgactgtggtggcgccagcctgtcgggccaatcggagtgaatgcactgtttctggcgatgtgcccgagtgactgacacccatcgcgacatcgcctgcttttaatagcgtagcctgcatgtacataaaatggttattgcttaccgcatcgccccgtaaaccaatacgcattagcttgtgtttcatatccagcgccgtgatccccgatgagcccacaccaaagatataaactgagtgacagtgacgtagggcgtccacgacaccgagaacctgttgcatatcaagcagatttagcgtttcagacaatacattactaatggtgttctgcaattttaaaccaatggcgtgggcatcgtcggattcgctaacttcggcatccagtagaggactactgtcatcagactcggtagtggcaagttcaatggccaggtccattttaaaatcctgaaaacctttatagcccagggtgcgacaaaagcgaataaccgtggcttctccggcctgtgtgtcgcgcgacaaatcggcaatagatgactgtgtcacctgtctggggaaggctaaaatatattgcgcaatacgctgggaggcacgtgtcaggcttttttgcatagcacccagagtgtcaaggatttttccgggtttaagacgtgggggttgaggctccatatagttcctgctcttgagggctgattgcggcacaaagcctgcaatatcgaacagagcagagcctatcaagtctgcggcatgaaaaaaagcgcgatgtaagtaaaggagggggaatatttacatcgcgttgccaacttatgacagaacatcactggagagtaatctgtttgctcttacggtgtttatagcgcgccatctgacggatggtttatatctggcccggtattgtcgccccgcgcgttggcgtcaccgtgtgctgtgtcggtatagcgtggtatcatgaaatcataatgtcacctttggctcaggtttttcatccagcgtcaatggcggtgccggggcaaataacggggcgaaaataacgccgctgatcaccacgcttagcgagccaatgaccccataaaagaagaagttaaggtcagtggcatagcgtgcgcccagcacggtaatgacgctgataataattcctaaaaccgcactcccggcatttgctcgtttaaagaaaatgcccagcatgaacagaccggtcattggccctcccatcagacctatcagactattaaatgcatcccagatttctgattcatcggccatgaccagccatactgaggccgcgctacttatcaggcccgcgaccagaataactaacttagctattttcatacggttttcaggcgttctttttttatgactcaaacgctgatagatatcggaattaaaacaactggaaatgctgtttaagctgctggagatactggactgcgcagcagcgaaaatagcggcgattatcaaccctgcaatgccgactggcatttcggtgaccacgaataagggcaaaatgccgccagtgttgaatcccgccggtaataattgtggatgttgctgatagtagacaaacaatgccgagccgatagcaaaaaagaaaacagggatcacagcaaccagtttggcatttgtaagtaatgttttcttcgtttcctctatggagtcagtcacgatatagcgttggaccacatcctgactggcagtaaattgctgaatattggcaaacagaaaaccaatcatcaatacaggtactgtgctttccgtccagctccagtggaactgcgtagccggaaagaatttatccgcctgctgcgtcaccgtaaaaatttcaccaatgccgccctggactttgagacatatcactataaaaatcagtatcgcgctgccagaaagtaagaggccttgaataacatcagtccatattactccttcaattccacccatccaagtataaatgatacacatcacgctaatcaacagtaccaaaatcaccgggtctatagcgatgaaggggcgcaaggccagcacggtgaggaaagtgataatggcgatacgtccgatatgaaacaacataaatgacatgctggcgaatagacggcagcgcacatcgaaccgtgcttcgagatattcataggctgatgtgactttcaatttccgaaaaaacggaatatagaaataaaaaaccagcggtaaaattgcgatagccagatactgaccaatgataaacgtccagtcggaagtaaacgctttggcaggaattgacataaatgtaattgagcttaacgtagtagcaaatacactgaccccagccgcccaaccaggaacccggccaccaccgcgaaaataatcgtctgctgttttttgccgtctggaaaaatagacaccgactaacatcatggccaggaggtagccaaataatacaagatagttaacgatgccgaaagaatgtgtaatcatagttctttcctgcttatggttttgagtagagttgcggtcatcgtctgtgtatttttatcttcccatcattcagacgatacgatattcagatcaagtaatagtttttgttactctcaatgacggtaatcatgagatgtaaaaggcagagcatttatgctccaccaatggtgatgcccagacgtatgtcctgccggatacctgaaatagcagatatccgatattgcgttcaaacaggcttcaggcctggggatcgtatttgccgatagcattattaacgtcggattattctctgagacatacatatcaatagtaagcgtgttcattttcttttcctgttcagcgttttactgcgtgactgaaccactgacagatatgctcgatacgggtgatagcggaaccaacggtaactgcccaggcaccatgctcaatagcattggccgccagtgcaggcgtgttatagcgcccctcggcaataacacgacaacctgcatggctcagttgtgtcaccattgccaaatctggctcaaccggcgtgatggggccggtatagccagacagtgttgtaccaatgaattcgattcctttctgatggcaacttatgccttcattcacggttgaacagtctgccatcgccagtaatccatgcaggcgaatacgtgtcagtaaactatcaatatcaaccgggcgagagcggaatgaggcatcaaaagcgataatatcggcacctgcctgcgccagggcgtcaacatcctgtaaatagggagtgatacggactggcgaccctgtaaggtcacgtttaattatcccaataataggaacagaaagatggggacgaacagcccgcagattctcaatgccttcaatgcgcacagcgaccgcacccgccgaagccgctgcctgtgccattgcagccacaatttcaggtttatccatagggctgcctggtaccggttggcatgagacaatcagcccaccgttttcgtgtacactttgttccagcctggctaatagtgacatccagttccgccttatatattttgaagttttgctccgttttatattatgttgcggagtgttgctgcatcaagcaaaaagatagaaaaatgtgaacacagtcataaggtatgtttgttattcaattactgcgccagcggatttgaggctataacctgaagctacaagacaaatacaattcactctgacggcagcatgctgtattttattaactgcttccggcataaagataaaatgctcagaaggagcttatacgccacgggatagccagtatgaaatgcatcacataattcttgttgtatttattcgaatgctatcactaatgagtttgaccataacaggtcacccataatcacttctaacatcaccatggtgtgcttttacctcgcacatgataacctcatgtaattatttttagcgcttggtcacattttgtcattatcattgttgaaattgtgcaccataatatcactaatgatgaagctttactccaattgtatttcttcgcatggggatgcagatgaaaaattttaagaaaatgatgacgctaatggcgctatgtttatcagtcgctatcaccacatcaggatatgcaacgacgcttcctgatataccagaaccactgaaaaatggtactggcgctattgataataatggcgtgatttatgtcggcttaggtaccgcagggacatcctggtataaaattgatcttaaaaagcaacataaagactgggagcgtataaagtcgtttcctggtggagctcgtgagcaatcagtgtcggtatttttaaatgatgagctttatgtttttggtggcgtagggaaaaaaaacagtgaatcaccgttgcaggtttatagcgatgtgtacaaatactcaccggtgaaaaatacatggcaaaaagttgacactatatctccagttggattaacagggcatacgggagtaaaattaaacgaaacgatggtacttattaccggaggggttaatgagcatatctttgataagtattttattgatatagaagctgcggatgaaagtgaaaaaaataaagtcatctataattattttaataaacctgccaaagattatttttttaataaaatcgtatttatctacaatgctaaagagaacacatggaagaatgccggtgagctgccaggcgcggggacggcaggatcgtcatcggtaatggaaaataatttcctgatgctgattaatggtgagctcaaaccgggtttacgtaccgatgtgatttaccgcgccatgtgggataacgataagctaacatggttgaagaacagccagttaccgccatcgcctggagaacaacagcaagaagggttggccggagcattttcgggctatagtcacggtgtcctgcttgtcggtggtggcgcgaattttccgggagcaaaacaaaattataccaatggaaagttttattcccacgaaggaataaataaaaaatggcgagatgaagtctatggtttggttaatggccattggcaatatatgggtaaaatgaaacaacctctcggctatggtgtatcagtaagttatggtgatgaagttttccttattggtggtgaaaatgctaaagggaaacctgtttcgtctgtaacctcctttaccatgcgtgatggtaatttattaataaaataattttttaaatacaaaaataaagttaattgatgagcggagtattttatgaaaatcaacaaatatcttctgggtatggtttcgtttatagcattttcatcatatctacaagcggcaacccttgattatcggcatgaatatgctgatagaaccagaattaataaagaccgtattgctataattgaaaagcttcctaacggcattggtttttatgtcgatgccagcgttaaatcgggaggagtagatggtgagcaggataagcatttaagcgatctcgtcgcaaacgctatagaactgggcgtaagttataattataaagttacggacaattttgttttgcagcctggatttatatttgaaagcggtccagacacttcaatttataagccttatttaagggggcaatataattttgattctggtgtttatatggctggtcgttaccgttatgactatgcaaggaagacagctaactatagtgatgatgagaaaacgaatagatttgatacttatataggttatctttttgatgagttgaaattagaatataactttacctggatggatagcgatcaaattaaatttgataacaaaaaaacaaactatgaacataatgtggctttagcctggaaactgaataagtcatttacaccatacgttgaggtcggaaatgtagcggtgagaaataataccgatgagagacagacccgttatcgcgttggattacaataccacttttgagaaaggttaaagagttactgtactaatctttgcttagtattcatatcgataatcttatagcccgtagctacgttacagaacgttagactttgtcttgagtattcacgtccttaacgtagctacgaataaggatgataaacaatgaatatacgccttacatagctacgatctcaggcggttgtcggaaagtgccgattgatagtgtcttattcggcaattgatatgacttaaaaattaattccgtaagcatttcagacggtaacagcaaataagggttttattgtgatagcaaaattcttcccgtggtatagcgagataacacgtccacaaaaaaatgctttattttcagcatggctgggttacgtttttgatggcttcgactttatgctgattttctacattatgtatctgatcaaggctgacttaggattgacagatatggagggcgcattccttgccacagcggcctttattgggcgaccatttggcggggcgctatttggtctgctggcagacaaatttggccgtaagccgttaatgatgtggtcgatagttgcctattctgtaggtacagggttaagtggcctggcttccggtgtaattatgctgacgcttagtcgcttcattgtcggtatggggatggcgggggagtatgcttgcgcttctacttatgccgtggaaagttggccaaagcatttaaaatctaaagcgagcgcatttctggtttcaggtttcggtattggtaacatcatagcagcctattttatgccgtcatttgccgaagcgtatggttggcgtgctgctttttttgtcggtttgctacccgttcttttagtaatctacatccgggccagggctcctgaatctaaagagtgggaagaagctaaactcagtggtcccggaaagcattcacaaagtgcctggtcagttttctctttgtcaatgaaagggctatttaatcgagctcaatttccactgacattatgtgtatttattgttctgttctctattttcggcgcaaactggccgatctttggtctactgcctacatatttggcgggagagggctttgatacgggcgtggtctctaatttaatgacggcggcggcattcggcactgtattgggaaatatcgtttggggtctgtgcgcagatagaattggtttgaagaaaacgttcagcattggtcttctcatgtcctttttattcattttcccgttattcagaattccgcaagataattatttactgctgggcgcatgtttattcggtttaatggcgactaacgtaggtgttggcgggttggttcccaaatttctctacgactactttcctcttgaggttcgtggtttgggtaccgggctgatttataatcttgctgcgacatcaggcacattcaattcaatggcggcgacctggcttggaataacaatggggctaggcgctgcgctaacgttcattgttgctttctggaccgcaacaattctactcattattggcctatccattccggatagactaaaagcacgtcgtgaaagttttcaatcaacaaaagaattttaatagaggataaatgatgacgaaatacggtgttgtaggtacaggttattttggcgctgaactggcgcgatttatgtctaaggttgaaggggcgaaaatcactgcgatttacgatccggtaaatgcggctccgatagcgaaagagttgaactgtgtcgccactgcaacgatggaggcgctttgttcccatcctgatgtggattgcgtaattattgcttcaccaaattacttacataaagcgccagtcattgcggcggctaaagcgggtaaacacgtgttttgtgaaaaacctatcgccttaaattaccaggattgtaaggatatggttgatgcctgcaaagaagctggtgttacctttatggcgggtcacgttatgaacttttttcacggggttcgccacgctaaagcgctcatcaaagctggtgaaattggtgaagttacacaagttcacactaaacgtaatggttttgaagacgtgcaggatgagatctcatggaagaagattcgcgcaaagtcaggtgggcatctgtaccatcacattcacgagctagattgtacactgttcatcatggatgaaaccccatccctggtttcaatggcggcggggaatgttgcgcacaaaggtgaaaaatttggtgatgaagatgatgttgtcctaatcacccttgagtttgaaagcggtcgtttcgcgacacttcagtggggatcatcgttccactaccctgagcactatgtattaattgagggcacgacaggtgcaattctcattgatatgcaaaacacggctggttatctaataaaagcgggcaaaaaaacacactttcttgtgcatgaaagccaggcggaggatgatgatcgtcgcaacggtaacatatccagcgagatggatggcgcaatcgcttatggtaaacccggtaaacgtacgccgatgtggctctcatcaattatgaaactggagatgcagtacttgcatgatgtgataaacggtctggagccaagcgaggagtttgctaaattgctaacgggagaagcggcgacaaatgctattgctaccgctgatgctgcgacgctttcctcaaacgaggggcgcaaagttaaactcactgaaattcttggctaaaattgaaagccggatggtggtgttattggccggtggcgctgcgcttatgtagaccggataaggcgcccgtgaactgtgccgccatccggcaatggacgggtcacatatatgaaaaaagcccgttgttctggtgtgaactccgactgtcgggctttgttgtttttggttataagaccgcttttaattccgtgaccatcattgtgggttcaaaaggaatcaaatcgactttagctacgccagacaagcgaaaaggatcttgtgccagatagttttgcagtacatccgcgtcatcatagtttgcaagtattacgcctcctgtgcgcggaatttttcgcccggaagccagaaaaagtccatcggcataacctttttttagccattccacatgtgcagggatttgcgcatcaatttcatgcaatggttttacgtaggttaagacaaccacacaaagcacactcattttgttgtccataaatataaaggggatattatgctagcactctatgcagagacgcgaaaaattttaatgtctggaattatggaaacgaccttccttagtgggccgttcttctatgcgccaggagacgccgccagtaatcttgatgaactttatgtgaggttggctgaattgcaatatgcgaaaaaagccgagcttgatgacaaacctgttgtgcggttacacattatccgacgtggcaacgttgggtgaggcgaaaccgaaacccaacattgcggtattgggtatgaatgttgggttacgcgccgttccacccaacctccgggaacgatggttttggcagttggaaaagcgaagcgcatttcggcatcaaggtttgtcagtcgtctgatactttcgtacaggctcttttttgaagatgccggtaagggggaattgactcgcttcgctcgcccttcgggcagtctcctcgcaggctcgtcgtctgtccagctggctgcgccgctactcagcccatccctggacctcgccccttcggggccagagcaagctctgttcaaaaacgctcccggcgtttttgtgtcgaaccccggtcggtggttctcatccccccttggtttgggggatatataagcaaaaagcccgtacttctgtacgagctctttcttgaatatggcggcgagggggggggccatatttacgttcattatcagttgacgaacttcttttgggattttagaagataaataataatactcgtctggggtatatgtttttgaatattctggctcctcgcgtgaatatgatgagttgcacacaaaaagtaaaaagcataacagtaaacgggtcatgattatttcgtatcctctgtataattaggaatatcagcatgcatcaattgttcggctctttgtttgtttagttcagccatacagaaatatatgcgagtaaaactccccacaccatttccccatgattctgcaaacgagcactgagcaagacgataacgaataaactcttgattagatttatccagtctgtagagtgcaatcgggatagcatcatccagtgctgcatttttgacttcagaccatttgtttatacgtaatctgatattttcttcggcctttctcagcgttatagtgctttcaagtacttcatttctcaggcagtcgacaagttccgcctcttctcctgattcacagttgttcttactgggataataaacattatttgcatatgtactatggattgaggaaaagctaaatatcaacgtggctaatattataaaaatccgtgcaatactaatcattgatttttatttcctgttgcagaggtaaataatgcatatacataaggcaatttttctgcatacttagaatctcctccgccattataactacatccactagctcattaaatgatagtcgcaaaatcactcattactttcattttttatttgcgtctttttatactcgtcatatattatgatggtatcatcatagaccgttagtcttgctgaataatctttattattcttgtatttgtttttcatcgagagtaatttattttcaatgtttgagcagtctcttttaatcgaatcctctacaaactgataagtcaatttttcttgacgaacatcaaaatcccttatccatccttcacaggaatcagcggtttcaaaaaaatcccgtaagtcttgcggcatatcataaataacgatatggttaacattttctgcaaataaatagttacagtaaaaaaatgccataatgaaattaattataataaggaacttcttgcgcataataacctctatatataatcgttaagccattttatttgtgaaatattcatctcggttttacaatataatgaagatattggaaccctataaccggaaagcgatccaatactaagtgatgcatagccgcattgtttttccctgtaaatgataaaataacgatgaagttcggggaaggttattcttgcaaggtgaatgttagaatcgtatgcaagagtcccatcttcattaaggcctctttcctttccttcatttttatcgaatctttccagccttttttgtgcattaatttcttctttttttaaagcgataacactttgctggtatttatccataaggcaccaatagacgtcatcctgttgtatctcattattgcatttcgcaggatcgatgttatgcgcattggctgcaccacatataagaaaaagacatagaattttttttatgttcattgattattccttgtaaacgttatttactctcatctgcgacaatgagagcgtatgtgaatctgattttatccgcataggtgtgatcccctctatgaccaggttgtgcttttgttgggtctatattatattgtttttgaatgttttcaggtgtaaataaaagccatcctggtatatactgttccagatgcgctttcttatacttaagtttatctccggggtgaatgactttaacgccattcagtttagtaagaacactctgtgttgtacctattttcttggctatggagctataaccacgatcaccctcaacaacttcataggtatcttcattttcattgtcataaacaattttatctttttctgtttctgacatttttatcattaaaagagcaatgcccgcccggatgttatattctggattgctccttataagatctgtcttattgattaaatatgtgttccatgttttcggaattatgatgttgtactttctagggcgagcaggaataaccacttctttgatcccctcatctcctgtgtttcctatctgtattggtctcgttttccacgccgttaccgccgcacctgtttcagtccatatcattgccttaatcaatttccagtccagcggcttatatttttcgatgtttttagatgttgataaatgccgattaatctcagatacaagtttcctgattgtattatcataaatataccagtcaggattgccaatcgctttttcccggccagccttccactcatcaagaggactgagttttttgggagggtgtccagaccctttccctgttgtccgggtatttacctggggtctttccctcggattttctgttgttgggatgcctttgtgtgccgatgctgtgcgatttaccatgtgcaaccctccattcatttgtaaaatttttactaaaacaccctctcatcccataaactgaatgcactggtcccggcaatacagtgttcccagtttatggattcatatataaaagaaatactttcctgaggttgtgcttcactgtcaatgactacatgcgcaatcgagaaattaatatcactaattcgggcgttttttaattccagtttgtaatatttttcattaataccaaatcgatttgttcgataaaaatcaaaagtgcaggtcaatatttcattatcgttaattgcttttcccagtaaaggagatgatttatcgacaggtttttttatcgtaactgaatgatgattgacattttgatcccgacttaacccatgtgtcagttcatataccataatatgatcaaggtgcagtaactgtgctttattaccgatagagtcaagggaacaacaacctgctgaaatcaatccttgcttttcaccgttcagtgttaaataaattaaattggccatgttaatctccttgatttaactattattttcgggggggctttagttgccgtttccggcactacattgtttttcagcaacagccagcggcttaacaccccatccagccgttcattaatttgtttttccagcacctccgcattccgtccctgagcgcgggcatcttggtactgcgtcagcagggactccagcggcgtttcctggttcagcaggcgttccgcctgccaggtcaccgttttaatataggagagggtaaagccctgcttctccgtttcccgctgcatcatcaggtcagcaaagtcacgcagattctggcgcgcctgctgccagccgcgcatttgtgggctgctttgcgcgcgggttttcaggatttcattccactgcgctgttgcctgctgctgttgcagactctccggccagcggctgtctgcggtatgcatcatctgcatccccgcctccagcagttgcagcggcgaggcgtcgggaagctgttgtaaccgctgcccgtagctgtccagttcaggcgaggccagccagagcattgccgcgccctgcgccgtgtcccttacctgcgccagttgctgttgcatcgggtacacctgccaccaccagagtgcggctgcgacagccgcagcgcagacgacaccggccataaagccttttatagtccggcctgacgtggccctggcgacaggctctggatcctccaccgcgccgtggtggacttccaccttcatttccggcaactcaggcaggggcggaaggttttccgccgtgaggggctgcgtgctctccggggcgtagatcaacgttctgacggtggtctgcggcggaatgtccacgctgcttttcggcggcggctcaagccgcttacgtgtgttctgcacaaaataaagcaggttctccacatgcggctggcgtttcagttccacctgctggagtttgtcgcaaatcaactgtaacgcccgttcggtgcggtacagcaacggcaggtccgcgccggagaaggacagctgctggcgcagaatattgccggtgcgcgaattaagccagtcaagcatcccggtgcgggctgactcatcctgcggccagaatttgtcccagtcgtggcttatcatggccgccagtagctccaccccttcgcaaaatccggccaggccgtgcgtgcgggtgcgcgccagggtgtaataagtggccgtgtgcagatccacgccatgggctttaaaaatggccagcgccagcgattccaccagtttccagttcagctccggctgcgacgggtgagacgatttgttgatctcttcccgcagggcgctgaactccggcaggccgcgcggatcctggccggtaacaataatgtgcgtgagtgcgtcctgactcatttcagcctcctcagtacagggtatccggcagccggaactgactgaacagcccgccggtgaaggggttatcttccgtatcggtatgtacccggtacaccatcgctccgccgtccacgttaaagcgcacgctgaatgtcccctcctgaacgccggtaagttgcccggcgccgaacagcctgaactgcgcccacggcccgctgaaactgatgctgcgcggcgcgccgccactgacgcctatcagcgtcagcttactttcattgccttcacgcatgttgttcggccagaccagatgggcggtgtaattgcggccctggctgtagtccactaactgcccgtccagattcagcacgctgcgccgtttgttgccggaaagcgacacagtttccacggcaaactgcgcgcccaggccgttctgtctgctgaaaaacgcctcgcggatttcctgtgcggtatccagttgctcccggacatcctcacgaataatcacgttgttatccccgtcctccagactcagatcgttttccataaacagacgcaggttctgctgataaaaggtatccagtacgccattcggtttaaagaagcgttcaaacgcatccagcgacgcatctgactgtgagcgtgggttaaacggataattgtcggcgagttgttcattaaagggtttgaccacgttgtcgcgccagtccacttccatatagtgaactgcctccaccatcaccacatgccaggcctgatccgccagcttgcccacccagcggttgagcggggcaggcagggttttcgccatctggcgggtggcgaaaataggatcgctgctgttctgatccagccgtagctgcaccgctttcagcgctgattttcccggcaccggcgcgttctgaatagccagcaggtaacggtgcagctccgtcagttgctgatagaccgcctggagagtgttttctttgtctttctgtaccgccagcgtgctgttttccggggcaaattcatgccccaggcgggtcagcaactggtaatccggctccgccatcgcctcctgaagcgccttgtcatccagtttttcagagagaacggcaggctgcgtgttgtcgcgcagtgccgtcagcgcccgctggagcggctgatcgccgctgatgatctgctccagcgccccggtcagttgcgcaatggattcgtaattgcgcacgttaaggttgtccattccggcgcgccaggtggcggtgtagtcgctgagatactgttcagtgagctggcgctggatttccgcccggtcggcgtcgctgtatttcacgctgcgggtcaggttcagcacccaggaatccatcgccgtcagttcgatcagcgcgtcgcgctgtttgacaaaataactttgcagaccgtaacgggtgaggaactgcggaacaatgagcttattatcatccccggaggtaaagacctgatcaaacgtggcgcccacctggtcacgcaggttcagatcagcgggcagcacgcccatcgcccgcgttttcagactctggtaaacgcgctggtagacgggcagtttgctgagctctttctgcgccgccacgaccggattgtcatacggcgtccagcggctgatggcgtcgccgtcgcctgcctgacgctccgcgtgccagtcggtgtgtttcagcgcgtagtccagatgagacattagctgtgcctgaatatcgcgctggccgtgaaatttatcgctccagcgtttcgccatatactgcttcaccacctcgtcgctgcgtccgcttttatcttccagcattctgataacgcgcaataccgcgagcttctcctcgctctccgcaggcgcggcattcatctctttgaccaggccgttaaacagggcgggcaggtaacgctgctccagcagttgcaggtaggtctgctccacatatgggccgacacgcctgccctgatataatcccatatcggccagacgactgcgatcgccccagtcgccgtaggccagcgtggcgtcacgcaccgggttaagtaacggtagttgcaggttgccataatcgtccataccctgcggtggcggaaccgacataaaagctttggcctgctccagtacggtgatgccggaacgccagttgttattgtaatagtgatgccagccgataatcagcagcagggcggcgatgccgccagtggcggaaaacacggacaaccggcggcgggactgcatcagccagacgcggctttcactggcgaggttcggctcagccagtaaggtctgcggaaacagattacgggtgaaatacggtaacgtgtccaccagcggccaggcggtcagcggactgctgcccagccggaactgacgggcggcggactgcataaaaatatcgtctatctggccgcgttgcagggaggaggtgaggtacacgccgcgcagcatcatatccatattttccccgtccagcagcccgttcagcagggcgatcagcggctcgcggcccccctggatctggcggacaaagctgaacagggaactgcgggagccgggggctaacatccgctccggcaggacgttattcaactgttcgccccatgtctgccagaaggcattcagttctgtacgccagtcgtcattttcatgggcatgacgggtaccagtatccgctgaaccctgtcacaggtacagatccattgggattaaaggtgacttttaagggtgacgaagaacagcaaaaagctatgaaagaggcatacgaatctgtaaggaagacaaaacatggtcaggaaatgatagaaaaaatggagttatctgatcatgattatatatttagaggaccgaggaaaggtatggaacatacatgctacgatccctccgaatatactttctatattgaaatagattctgaccatgccgcatgccaatatcaaggaaaaggtaaagcatgcaaactgacacctacgccattaagtgtagttatcgcccacgaaatggggcatgcaatgggtgaaaatgacgacggaccaggacatatgaataatgtcaaaaaacatgagaaccctgtccgcaaagaaatgggaatcccaccaaggatgaaatactgatgataaagataagccctccctgcttaatgaaattttatgtattttctttgcatcttcaaaaaatcattaaaaatacattattgttgcttgtctgtattttaccatttttttgcgatgcgaaaatgctatttttccgtattccttttcgtattcaaacctatacaccaataacaagggggggaattaaaagacttgcagtgaaaggaggggtgcaagaattgctgcaacgaaatcatggaaaagtattagcattactaagcccacatgggaataaatgttatctattcgatgatgaaaacattagaatatatatatatgaagataatcacgaatatttcatagataacaaaggtgtagtgttattcaagaataaaaaaaactataaatgctcaaaaaataaaattaatgagaatgaaatcgttatgttattgaacgatggaaatgtagatacatgggagaaagatgaataataatgagaggaatcgcataattcctgtagtgggccaggaaaatatattaaaaataaaacgatagtacgatgcagaaaccaaccggatctatatcaccaacactatgatttgttgcaaagaaagtatatcaccaaagatccgatagggctggaaggcgggctgaacctgtatcagtatccgctgaatccgattttgaatatagatcctttaggattatcaggttgggattctcttggatatggaggatttagggaaatatgccagcaagctggttcggcagtacattatctaacaccacaagaagcagcaggagtgatacataatatggaaactatgcataacgtatacaatccgttatctaaatatgttttcgggatatcagtaggttcaactataactggtatagctggtacgagtttcggagtggcaactgttgcagaaaaaggttctgcatgtattaaagatgtagttaagtccatgataaaagacggagaaagagatccaacaaatttggcattaacttgcggaaaaagctttataaatgaaggagattccagttttcagggtaaggtatccgattaccttattgacgctcttttttcctataaggcgaaacagtaatcactgttatggataacgtaacagtaagaaatccatctattttaacaatagtaagctgaaggataacatgaagaaaaacatattaatgatggtttttacagtaattgttttatttggaggagttattgcttggctttatcattcaaatgatagtttggaaaatgtgagtgcgaatagtgatatagcacatctaaccaagttagcagaacagggggatatgaaagcacaaacagatctggggcttgcttatgggagtggtaacagtatcccacaggattacacaaaagcaatgtattggtataatcaggctgcaaaacaaggttacgcaccagcacaatttaatctcggtcttttctatgaaaatggttggggtggaagcagagatcttcaattagcaaaagaattttaccgtaaggcggcaaatcaaggctttaccaatgctcaaataaatttaggcattctattcatggatggcaaaggggggggattgattatgttcaagccagaaaattatttataaaggctgctgaatccaataatccagttgctatttataatctgggacacatctataattatggattgggcattccaagagatgatgttcaggctgcaacatggtatagcaaagcggaagatcttggttcaatgagcgcaagaaattcacttgctctattttatgcaaaaggattgggtaatctgcctgttgacagaaataaggcattaaaattattgaatatttctgcttgtcagggatatgcggtagctcaaaataatcttggaatattatattctgatggtacagatgaattatctaaagattatcagcaatcctacgcctggttctcagtggcattttataatggttttaaagaggctgatacctcacgaaacgtaatcatgggaaaattagaaactaaagaaattgaaaaagctaaagcactttccactgaatatattgaaaaataccatactaatctcaatggagatgacacagatagagataaagagtgtaagcatttatacccgtgattattgaagatgcttgatttttcagcgacagaagatcattctactcgctaagaaaatgttcattactgaccaagaaaaagttgaacttgaacgccttcacaattccagtcgtgacgggcgaggcagagtgatcttacccagaatagtggacacgcgactaagtgagtaaactctcaagtaagaggtgactcacatgacaaaaccagcatcaaccaccaaaaagccacgcaagcagcacacgcctgaatttcgtcaggaagctatgaaactggctgaacgcattggggtggccgctgccgcccgcgaacttaacctgtatgaatcacagctctacaactggcgaagcaaacagcaaaatcagctctcttcttctgaacgcgagcaggagatgtccgctgagatcgctcgtctgaaacgtcaactggcagaacgggatgaggaactggccattatccagaaggccgcgacatacttcgcgaagcgcctgaaatgaagtatgtcttcatcgaaaaccatcaggctgagttcaatatcaaagccatgtgccgtgtacttcagattgcccgtagcggctggtacgtctggcatcagcgtcgtcatcagataaaccggcgtcagcggttccgccttgtctgtgataacgtcgtccgggaagcattcagtgacgcaaaacaacgctatggtgcgtcacgcctgacggatgagcttcgtgctcaggattaccagttcaacgtgaaaaccgtggcggccagcctgcgtcggcaggggctgcgggcgaaagcctcgcgccggttccgtccggtcagttaccgcaaacatggtctgccagtctcagagaatctgctgaagcaggacttttacgccagcggcccgaatcagaagtgggtgggtgacatcacgtatcttcgcactggtatctggccgtggttatcgatctgtggtcgcggtcagtcattggctggtcgatgtcttcgcggatgacggcacagcttgcctgcgatgcgttacagatggcgctgtggcggcgtaaatgtccggaaaatgtcatcgtgcatacagacagaggcggtcagtactgttctacggattaccagagcttactgaaacgccataatctgcggggaagtatgagcgccagaggttgttgttacgacaatgcctgtgcggaaagcttcttccatacgctgaaggtggaatgtatccacggagaggactttgtcagccgggaaataatgcggacagcagtgtttaattatattgagtgtgattacaatcggtggcgtcgtcacagtgcctgtggcggtctcagtccggaacaatttgaaaaccagaacctcgcttagggttgtgcccatattacgcgggtaggatcagaaaccccgctgacagtgttgaatccaaagacttaaaaagcggagcgacagctcctctggatttatgtcagcggagagtccaccggctccgtatttggcactgttcgtttactggtagcggttcaccagatctttcaccattgacgcataggttctttgcctgagctgcgaaatctgctgttctgtagttgcctctgcggaatcttttttccccggctgtggtggaagtactgtattctcatagttgagtggcgaccaggtggcccattcgcccgtagccacgttcactaaggtgaaacgcaccagataacgcaacgatacgctgtcggtcagtttttcatttttaaaatctgaccagacggtgttttttgtcatggcgtcatatttgccagactgcaacgtatcctgataaacgataatggctttctgatgtcctttcgcggcaacatagcgcagcgcctgcatccagttcatattttcggcagtagcaatgtcctgatttccgtctttaattttgtctttactgcaggtcacagtcttttgtctgtccgggatgccagagaacgtcgcaacagtataatacttgctcatttcctgctgcataatagcttccggtgcgcgattaccagactgaaccagaatgacggcagaattcagcggtacgctgaatttctcaccttccagtgcggcctggatatcttcttctgaaacggcaagtgtggtctcgttaccaaagatatctttatctgttaactgactggccatatttttactgatactactttccgttctggggacgtcctttttctttgcgtcaatgggggaacgcacacaggcgctcaataaaaatattgttgtgcataaataaatcattgaacagattttcatatgttttcctgaagtgtgtattggatggcgatgtaattaaaagactctagttattgtttttattatatcctgttattgataatttcaggagaattgttttgtattcataaatcaaatgaaatgttctattttgatattccctgattattgttaatgtgtctggtatcaattttagtatttgatttttatttgccagtggtgtttctgtttgtaataactgacgatgatattgagtccctctggaagataaataaaggaggatgtgatatgagttcggttccttatcacagtaacaattctgtcatgccggtccgggtaacgatttatgaagccgttaatattataaaaaagcaagctaatgaagagattacagccagtgaaatatggcgttatgcgctctatgggcaccctacgctatccatctattttcagtctccggtgatctttcggcggattaaaaccagaaaaaataaaatatttttaatgaagggaaaggatgatccagttaatcgactctgttacctgaacagtgatatcattttatgagcaatagctggagggtgaaaactgaaggtgattacatctctccacccagtcatataatggatacaccattactgggctatgaatatgttatgctgcaacgattactggcgcattcactgaatctaccgctaccagagagcgggcagtgtaatatctattgtggcgttcttgtcagtgatggaagtaatatttttcagatttttgaatatcagtctctggagcaaaggatttttcagcagttacaattaattccggtagataaagcaagcctttgccatgacgaaatcaataaaatacagttcgacagaacaaagaaagattactttcctgtctatcattttccaggagatgcctgtttcgttgtaaaaatgtagcatcttgagtcattcatcagccggttttattcctctcagactaagccatcaacacagatttcaacgccgctgtcgcggttattatggcttgcctgtaaacataatgaacacactaattctctgcttgaccacccttataaactggtcgcacaagatcacaggaacctctcacgatgaggcgcatgtatcctggtttacgacatcaggaaatgtggcgcgtttattgccaggtaggcgttatgagacgtcacttatttacgccaggtttcagccgtagcgacgggcatggataaaaagagtatggcaatcagcgtgataatactaaaaaacaattaatatttttttaacaaaactaaagcttgctatgtgcagttaaccatgcgttaatggttgtgcggtttgatacaaacttatctgaagtagtgattgtaatatttctcatcatttgttcctcttgagatctcctttaggtttttttctctctgataattttcttcaggccattttgcccaagggctcattcaaaaggtaacaatattatgacgacgaaaatcactggtttagtaaaatggtttaaccctgaaaagggctttggtttcattacgcctaaagatggcagcaaagatgtgtttgtgcatttttccgccattcaaagtaatgaattccgcactctgaatgaaaatcaggaagtggagttttcagtagaacagggaccaaaaggtccatcagcggtcaacgttgtggcgctttaaggcaactaatattactaataaaattcacttccggtgtccatgttgccatggttcacaatacagaacatcgacattcgatgttactgagcaaaacccgtttggcgcgaaatgtattttttgtaagtcaaccatgatcacttttgataatgttggattatacattcgctcaggacaggttccgccagattttagaaaataattcatattagctccgtacaggagcttttttatgcccggatgattatcatctatagacgctgacatccatcatctatagtggcttacctttccccaaaggtgttatttctcttgcagacagcgcctgaaaaaagcgacgttgtcttcatctatccgatgaaaccaggtcaacctgtctttgtgcccttatccgttatttaattcttgccctataataacaagcccgcgctaagcacgggcttgaataacataaagcgtcttagaactggtagaccagaccaacacctacgatatcatcggttgcaataccgttgtttgcgtagaagtcatcatcttcgtccagcaggttgattttataatcaacgtaggtggacatatttttgttgaagtagtaagtcataccaacgtcaacatatttaaccagatctttgtcggtgtaacgatagttaccacggctatctttatcctggccgcctaaatctttgcccttagactgcaagtaggcgatggacggacgcagaccgaaatcgaactgatactgcgcaaccacttcaaagttctgggttttgttagcgataccgccattaccgccatcgccgccgccataataggtcatgttgcgggtttcagcgtacatcgccgccaggtaaacattgtaggcgtcatatttggcacctacggtccaggcttcggcagtttcaccgccggcatagctattggcatagtaatgatggccatcaccatacccacgagtaacctgattgtccgtacggtcagaggaagagtaggccgcacccaggcttaacccgaagtcaaagtcgtaggaggtagacataccgaaaccgtcgccgttttcacgggccagtttgcgagaaccactacctgcatcgctgccgttggttgttccttcgcctgcgccaggatcttcgttattgccctggtactgcaacgcgaagttcaggccttccaccagaccgaagaagtcggtattacggtaggtggcaacgccgttggttctgcccagcatatagacatcggtctgggtataagtatcaccgccgaattccggcagcgcatcggtccaggcttcaatgtcgtagataacaccatagttacggccataatcgaaagagccgtactcgccgaatttcagaccggcaaagcccagacgagtccaggagtttgcaccttcgccttcggtggtgttcaccttaatgttgtattcccactgaccatagccggtcagcatatcgttgatctgcgtttcgcctttaaagccaatacgggcgtaggactggtcgccatcgtcgcctgcattgtcagagaagtaacgcagaccatcaactttgccgtacaggtcgagtttgttgccatttttattatagatttcagccgcatttgctgcgcctgccactaataacgccgggacaagcagtgccagaacttttctgttcattatgtattcccttatgataataatttatatgaatatgtagccacttcaacaaaactacaaattgatactattctatgaagttcatggaatttaaaaaataacatgtaacaaaggtatttaaaatatttcaatttgtttctatttggttttttataatacaggctatataagtgactaagaatatatagtctataattatcattttttatcaatgagttatgtgttttgatttgatggctgttggcgtgaatataatttgttttttatatgtatttgatgctttgattatgaaaaagcataaaaaaaaccggcataaatgccggtaatgtgggtaatgataaaataaatgataaaaggctaataaccgaatcattctgacatttaatgctaataaaataaaacgctatcgcggtgcgtaaaaataagttgttctggttataggttattctgcatcagagtgcgattcaatcaccattcccttatttaacagcaggttcagcgccagacgtaacattaactgagaataaactatttgtggaatgaatagccagaacaggtggatgaggtattccatggtcgaaatgtgattaatatcacattataatgtaattaatgtcatatgacttacatcacaaaagcggagtaaagtttgagtaccagggaggacaacgccacccgtagcatgggcggtaaattagcgttatgggttttttataccttttgcggctacttcatctgggcgatggcgcgttgcgtgtggctgatgtccgccatacaaaccgagccggttctcggcccaatcagcactcctggcagcgcaacggaaaaatggcttaacgcgctttcgctgggcgtcgtctggcttattctggggagtattgcctggtacacccggcctcgcaaaaacagggggtatcccgccgacactcagccagaaacgcgcaagcacgcaaggatgtaaagtggtggcggatatgtcaggatagcgaaccctgtgctcaggcatgtaataaaaatggtctgctataaagagagggcgtatggactcaggatattggcaatcgcagtttgaagactggctacgtcaccaccaccaggaacaggatgccgcccatgacatcttccattttagtcgtgtttgggcaaccgcgcaaacgctcggggaaaacagtcctgtcgactggctggtggtgctatcggcatgttatttccatgacatcgtcagcctggcgaaaaatcatccgcagcggcatcgttcttccattctggcggcggcagaaacccggcgtatttttctgcgggattttcctgactttccggcagaaaaactggcgggcatttgtcatgctatcgaagcgcatagcttcagcgcaaaaattgcgcctaccacgccagaggcaaaaatcgtgcaggatgcagacaggctggaggcgttgggcgccattggtctggcgcgggtcttcgcggtctccggcgcgctgggcgtcgcgctgtttgatgccgacgatccctttgccgacagacggcctcttaacgataagcaattcgcgctcgaccattttcaaaccaaactgctgaaactgccgctgacgatgcagaccgaacggggcaagtacctggcgcagcgtaatgcggattttctggtgtcgtacatggcgaaattgagcgctgagctgaaaggcgactatgaaacacgggatgaggcggtcatccagatgtttgctacgcatcagtaacccctgccgctgaaacgtaaaccgcgtcattttatgttagtctgtcggcaattatttttggccggttaaatgtatgcaggaaaatatttcagtaacacacgcccggaacctcatcgccgacgacgccggaagcgagatccaggcgatgctgagtcaattgctggaaatctacgatgttaaaacgctggtggcgcaccttaacggcctgggcgaacagcactggagcccggccatcttaaagcgcgtaatgatgaacgcggcatggcatcgtttgagcgacaatgaactcacctgtcttaaaacagggttgccgacgccgccagcgcatcatccgcattacgcctttcgttttatcgatctcttcgcgggcatcggcggcattcgccgcggatttgaagcgataggcggacagtgcgtgtttaccagcgaatggaataagcacgcggtacggacatataaagcgaactatttttgcgatccgctgcaacatcgctttaatgaagatatccgcgatatcacgttgagccaccgggaaggggtcagcgatgatgaggcggcggaacacattcgccagcatattccgcaacatgatgtcctgctggcgggctttccctgtcagccattttctctggcgggcgtttccaagaaaaatgcgctgggccgcgcccacggctttgcctgcgagactcaggggacgttattttttgatgtcgtaagaattatcgacgctcgccgccccgcgctgtttgtgctggaaaacgtgaaaaaccttaaaagtcacgaccagggcaacactttccgcattattatgcaaacgctcgatgaactgggatatgacgtggcggatgccgctgacaatggcccggacgatccgaaaattatcgacgggcagcactttcttcctcagcatcgggaacgtattgtgttggtgggattccgtcgcgatttaaacctgaaaaccgattttacgttacgcaatatcgcccgttgttatccaccgcgccgtccgacgctggcagaactgctggagcccgtcgtcgaagccaaatatatcctgacgccggtgctgtggaaatatttatatcgctacgcgaaaaagcaccaggcgcggggaaacggttttggctatggcatggtttatcctgacaatccggaaagtgtggcgcgcacgttatctgctcgctactacaaagatggtgccgaaattctgatcgatcgtggttgggatatggcgaaaggcgaagtgaatttcgacgatgctggcaaccaacaacatcgtccccgccgactcacgccgagagagtgcgcgcgtttaatgggatttgaggcgccgcaaacgtaccagttcaggatacctgtctcggatacgcaggcctatcgccagtttggcaactccgtggtggtgccggtatttgctgcggtagcaaagctgttggaacccaaaattcaccaggcggtgacgttgcgtcagagagagacggtagatggcggacgttcacgataaagccacgcgcagtaaaaatatgcgcgcgatagcgacccgcgatacggctattgaaaaacgtcttgctggcctgttaagcgcgcaggggattacgtttcatactcaggacgcgacattaccgggcaagccggactttgtggtgaatgattatgattgtgtgatttttactcacggctgcttttggcatcatcaccactgttatctgttcaaagtgccggccacgcgaacggctttctggctggaaaaaatcggtaagaacgttgagcgcgatgagcgcgatattcagcgtttacaggcgcttggctggcgggtactgatcgtctgggagtgcgccttgcgcgggcgagcgaaattgagcgacgcggcgttggcggagcgcctggaagagtggatctgcggcggcggcgccagcgcgcagatcgacacccaggggattcatctactggcgtgaatcttccgttttacacggcgtgaccaccgccctggcgggaaacaggtacttacccagagtcaccagcactacggcaaacacaatcacacccagcgcggcccattcaacgggcgataacctctcgccgcccaggccagtgccaagcaacacggcgacaaccggattcacataggcgtagctggtcgccagcgccggactgacgttgcgaatcaggtacatataggcattaatggcgataatagaaccgaacaacgccaggtagccgacggccataaaccccgataagccaggcagcgtggcgagcttttcgccggaaagaaacgccgcgcaaagcaataccacgcccgccgccagcatttcaatcgcacccgccatcatgcccacagggagggcgatgcgcgagccgtaaacggaaccaaatgcccagctcatcgaacctatcaggatcaaaatcgcgccccacggattgccgcttaaattgccgccgctgttcagcagaataatcccggcaagtccaatggcaatccccacccattctaatttgcgcgctttaataccaaaaaagtagctaaagcacagcgtaaatagcgggacagtggcgaccacgacggcagcaatgcccgatggcacgttttgatgctccgccaccgtcaccagaccgttacccaccgccagcagcagtagaccaatcagcgcggcgttgatggtctggcgcagcggcggaagtttttcgccgcgcagcagcaaaaacgccatgagcaacatccccgccgagagaaaacgtacgcctgccatcatcagcggcggccagctttcaacgcctatgcggataacaaaataggtagacccccaaatgatatacaaggcaaaaagcgcgccaaaaagaggtaataactgccggaaacgcataatcactcacggtgaaataaaaagggtgaatatagtaaacgtcaaaattattatgctggcgagcattataattgtccttttggaataaaaaggcgttgacccgcgccgccggtttcggcattgcgcgttttgctacatacttaacgtcttagaagaaaagaccgaggaaatcattttggcaggaagtagcttactgacattactcgacgatatcgccacgctgctggacgatatttcggtaatgggcaaattggccgcgaaaaaaaccgcgggcgtactgggggacgacctgtcgctcaatgcgcagcaggtgaccggcgttcgcgctaatcgcgagctaccagtggtatggagcgtggcgaaaggatcattaatcaacaaggttattctggtgccgttggcgctgctgataagcgcatttatcccgtgggccatcacgcctttattaatgttaggcggcgcgtttctctgctttgaaggggtagaaaaagtcctgcatacctttgaggcgcgaaaacacaaagaagacccggcggagcggcaaaaacgtcttgaagcgctggctgcgcaagatcctttggcctttgaaaaagataaagtaaaaggggcggtccgtaccgatttcattctttccgctgaaattgtggccattaccctggggattgtcgcgcaggcgccgctgcttaatcaggtgttggtgctggcggggattgcgttggttgtgaccattggcgtgtatggcctggtgggtattattgtcaaactggatgatatggggtactggctggcggaaaagcgtagcgtgctggcgcagggcgtcggtaaaggattactgattatcgcgccctggttaatgaaagcattatccattgttggtacgctggctatgtttctggtcggcggcgggattgtcgtacacggtattgcgccgctacaccatgccattgaacattttgcgcagcagcagggggctttcatggcgcatacgatccctgcggggctgaatctggtgctcggctttattatcggcgccattgtggtggcgctggtgaaaggtgtggcgaaaattcgcggtgtttcgcactgattttctacaatgaattatgcaaaattgcccatcctcgtctaaggtgaaaacgtttcatctgatacaggaggcaggtatggtcttttctgtcagtgaggaagttaccgtgaaagagggtgggccccggatgatcgtcaccggttattccagcggaatggtagagtgtcgctggtatgatggttttggcgtaaagcgggaggcattccatgagaatgagctcgtgccaggcaaggaaaggcgcgggcgggacgaagcccgatgacaaaacgcccggttaatgccgggcgttttgctgtggagaaaaagagtcgtcgcgctgcgacatgctgctacctggttatgccaggattgagtggtatcccttgatgaggtctggctaccgtaagccatcagggggagttgtatcaataaccaggagttaccagggtgccgcacgaaacactgttagacaatcaaggctggtttaaaaagctggcgcggcgttttggtcccggtcatgtcgtcaacacctgttttctgatcgtgatgctgttctcgacgctacttacctggcgggaagtgatgatactgaaagacgcgtatgtcgccagtcagcgcaatcatctggggagcgtcgcgaatgtccttgaccgccaactgcaattcaacatggacaggttgatctttttacgcaacggtatgcatgaagcgctggtggcgccgctggctttttccgcattgcaaagcgcggtgacgcagtttgagcaacgacgcgtcagacatttctggcaactggagctggataagcggcggacattgccgttgtatggcgtttccgatcaatttgtcgcccggacgacgcttctttcgcgggagagtcgtgacctggcaaatgaattaaccgccacgctggagttagggtatctggcgcgtctggcgcgctcatccgccatgctgacgctggagacgatgtatgtttctcgctcagggttttacctctcaactctccctacggcgtacggtagcgatattgtctcccgttactatcagtacgtgactcagccctggtttatcgagcaaagccaacggcgtaacccacagcgcggcgtgcggtggtttacctccgcacagccctatgttgctgacgagcagaaaaaagtgacagccagtctaccgctggatcacgataattactggtatggcgtactggcaatggatattcccgtcgcgtcattacagcggttcctgcgcgatgcggccgaaaaggatattgaaggggaatatcagctatacgataaccatctccgtttgttgacggactccgcgccggaacaacaaaccgcgaatacgttaaatgaccgtgagcgcgccttactggcgcgtgaaatagaaaaagataccctgggcgggctgcgtttaggaacgcattatgtaagctgggagcggctggatcattttgatggcatcctgctgcgcgtgcatacattacgtgaaggcatacaagggaattttggcagcattagtatcgcgctgacgctgttatgggtgctttttacggcgatgctgttgatctcctggggcgttattcgacatatggtcaaaaacatgtttgttctgcaaaattcgctgcaatggcaggcatggcacgatccgctgacccggctatataaccgtggcgcgctgtttgaaaaagcgtccaggctggcaaagcgctaccgggaagcccgccagccattttctgtgatacagctggatttagattattttaaaagcgttaacgatcgctttggtcatcaggcaggcgatcgcgtgttgtcccatgccgctgggctcattggcagcaccattcgagcgcacgacatcgccggacgggtagggggcgaagagttttgtatcgtgctgcccggcgcgacgaaagcgcaggcgctgcagattgccgaacgcatacgccagcgcattaatgacaaagagattctggtgacgaaaagcacgacgcttcgtatcagcgcgtcaatggggatcagtagcgcggaggaatacggcgactatgattttgagcagttgcagtcgctggccgacaaacggctttattacgccaaacagtccggacgtaaccgtatttgcgccagcgacgcgactcaggagcgggaaaagaaatagtccattccttcgcgccagccatccggcccttcgttctggctacggtagacgcgctgaggatcgtcgttacgcaaatgtacgccctcccggtttagccctttgacgacaaccgcataatccatcacatccagtaaaggcgcatcattggggccgtctcctagtcccaacgtcagaggacgcgcgcgccactgccgacgatatgcttcaatcagccagttggcagcctgatctttaccggcggaggcgtccagcacatgccagaaacgggcgccatggacaaattgcagtcccaggtcatttaaatgggcgacaaactgcgccatgcgttcatcgctatcgcgccagatcagcgacaccgacgcttcatgcagacgggttagggcagactgtgcccggtttaggcccgtccattcgcttatcacctgatcgtcaacgtcatcaaacgtggtgaacttaaactgttccttttcacgcaatttatgcaggacgaggcggatttcgttgtgagaaataccggctatcaggcggggatagttgggatggtcttcccaatgaacgtccagttggatcaccgcgccgttttccgcaatcagcggcagtccctgtagatttaacgtcgtctggagctggagcatttcagccgcggttttactgctacagaggatcacgggcacgccgctttcatgcaggcgtgtaagccagggagccgcgggctgccactcaaacgtgtggctgttcagcaatgtgccgtccagatcggtaaaaatcagcaaggggtcatggattgagagcattttttcctcattttccgttgcaacggcgggcttatttccaggaaaagtcctaaagcacacccgaaagaagtcgaacgctaactggaaccgatcccgtcgcttccaggcagcacatgcgttgtcacacttttgctaccgaactattagcgcgcttaatcattcatgtaaaaaatatttacttgtcatgcaaaaaaattgcagataaggtaaatctcacatcagatttcctggtgtaacgaattttcaagtgcttcttgcataagcaagtttgatcccgacccgtagggccgggatttttttcggccatttttaacggtttacttctgttacactaaaatcatgaatatccagctcgaatgcttcagctaattcatgccatgtatgatattcccgtccgtctacgctcacccgctcaggatcttcctggctacggtgaacctcgctttcgctgatttcattgatggccgccagtagcgcatctacatcgacgctcacttcgcgcttggccgtatcactgtactcttttgccgttttcatcttcactacctcacgggttcctgacagcctaagtatagaccgttgagaaaaccagcaaacacgccggcaaggcgctgtcagacgcagaaaattgttctacactggcacaaagcgacaggaggaaaacgatgaaggtgaatgatcgggtaaccgttaaaacggacggcggtccccgccgaccgggcgtggtactggcagtggaagaatttagtgaaggcacaatgtacctggtttcgctggaggattacccgcttggcatctggttcttcaatgagtcaggtcaccaggatggtatttttgtcgagaaggcggagcaggactaattgagccggactggaggtacattgccagtccggatgtctcagcgcatgttaacaaaaatgccgttagtgacgttatctgtcagccgcactacgtgatagatcacttgtttattatgcgtttttatctttctttttatattccccttatgggaggatactgtttttgctttaatattcattctgtcagaaatctgaatggttccctgaccttccatccacattcgcaacatgctggattcagttcgacttaacgacaatgttggtaaatttatggttcctgaaatacccgactcttttttcagaatatcgccaagaatggtatccagcgagtcaggtttaatcgatttcgagctaatcaataagttttttcttactaataaatattcatcaaaatgcacattagcaattgccataaaaacaataaataacgtgtcaggatgttgattaatgatttgctttatttgttgactgtctgaaggcgtatgaatgaaacagtcctcattaataaacaccaccgaaggctgatgcgcgccacaagcgatagcgagttcgtcaacggtttcgatgtcgttgatttccctttttttcacccctctgctgaccagatacccgcttaaccctagccgggtgtaactgcataaatccataataatcgttgacatggcataccctcactcaatgcgtaacgataattccccttacctgaataactcaccataatcagacggaacacgaatagtcaccttagacaacgcttacgcggtttttcaggcgaacttactatcccgtaaagttacatataatttgccaggaatcatcttaaagtaaagtgaatgttgcgttatgtgagtgaagtaaaaacaaataaggggcagcggatatatcctggtgaatgttttttaaaatttattttcggataaaccttagtaaaacaggataaaaattatgggttattatttatcggcatctcgctaacaatatcagcaagcaaattgaaaatttcgctgaataaatgttcgcaaaacggcgcaattaatggcattagcgcggccatcagcataatgccgacggtgagggtaagcgggaaaccgataacaaatatcgagagctgcggcgccatgcggtttaatagccccagcgccaggttgagcgtaagcaggagggtaatgaccggcaatgccagcatcagtccgtttaagaaaatgagccctccggccctggcgagcgccataaatgcattactgttcaccgggttactaccgatgggcagagtgtggaaggtatcgaccagcagcgaaataagccacaaatggccattaaaggtgagaaacagtagcatggcgagcatatccataatacgcgccagaaccggcatattcaggtggctgcccgggtcgacgaaggtggcaaaggaaagccccatttgcagaccgataaactcacctgcggtacgcaccgccgcaaaggcaaattgcatggtaaatcccagcgcaataccgatcagaatttgttgcatcgccagccataaggcggcaatagaaaaaagcggcgtatcgtttgccggtagcgacggcgcgataacgagggtaatcattattcccaaccccagttttacccgcttgggaatagcgcgctcgctgagaatgggtgccgttgaaatcagcgccagtacgcgcagcaaaggccagaaatagagatgcagccagtatagccattgctcgcttgtaacctgtatcatcgttctgtttatccgatgatataaggtaaattgctgaacagagtgcgtacgtagtccagcagcaggttgagcatccacgggccggcaacgataattgcgatgaataccgcgacgattttagggataaacgacagcgtcatttcattaatctgagtcgcggcctgcaagatgctgataatgaggccggtaatcagcgcgacgagtaacagcggcgcagccagggcgagagcgactttcatcgcctcggtgcccatcatcatgacggattcaggagtcattttgcgcctctaactgtaaaagctttgggccagcgaccccacaagcaattgccaaccatcgaccagcacaaacagcatcagcttaaacggtagggcgattgtcgctggcggcaccatcatcatccctaacgccatcaatacgctggcgatcaccaggtcgataatcaaaaaagggataaaaatcgtaaaaccgatctgaaacgccgtctttaattcgctggtgacataagcgggcaggaggatacgcatcggtactgcttccggtccctgtaacggaccgctattggccagacgggcaaacagcgccagatcggcttcgcgggtttggcgcaacatgaacgcgcgtaacggttgcgcgcctttatccagcgcttcctgcatagaaattttctgctcgctaaacggctggtaagcatccacgtaaatcttgtcaatgacgggcgacataataaaaaaggtcaaaaacaacgccagcccgagtaacacctgatttggcggtgccgagggcgtgcccagcgcgttacgcaacaggccaaaaacaatgatgatacgcgtgaagctcgtcatcatcagtaaaatcgccggcagaaacgtcagcgaggtgatgaaaaccagcgtctggacggataatgaccagctttggcctccgcccgctaatggttggctgataagccccggcagttgcgcagcagcggcgggactaaaaagccacagacccgccagagaaaggaataacaaacggcgcatcaggatctcccggaacgcttgagtaagctcttcatcatgttctggaaatccgccggtggggcaacgggtgcttccgtgtcattctccgcgggcgggagggtgtgcagcaggttgatctgcgaggcggtcacgcccagtaccagacgcgcattttcgacctcgacaatcaccacgcgttcgcgcgggccaagcgaggcgctggctgacaccttgagtccccggacgctatttccttttggcgcgaatcccatacgcttaatcacccaggccgccgccagaatgagcgcaataatgccaattaatgcgccgctcacctgcatgagcggcgatccggctggcgcggtgggctgagaaaccgtggcctctgtcttcatcattaacgactcaaacgacgcatacgctcggatggcgtaataatatcggtgatacgtacgccgtatttatccgccacgacgaccacttcaccctgggcaatcaggtagccattaatcaggatatccagcggctcgcccgccagcccgtccagcgcgacgaccgacccctgcgtcagacgcagcagttctttaatggtcattcgcgtgcggcccagctctacggtcagtttgaccgggatatccataatcagatcgatatcctgcatagcaccgctgacatcgccgccgccaagctgttggaaaaccgcgtcggcggcgcttttagtggtggtcgctttttgctcgtttaacgcgtcagcccacagatcatccaatgcgccagtattctcatcggacggattattcatgtcactcatttgggctgttcctcattcagcgaattcaaaattgggttgatcaaatgttctacgcgtagcgcatactgtccgtttacggtgccatattggctggtgagtaccggaacgccgtccacatgagcaataatgcggtcgggtttttcaatcggcagtacatcgccgggtttcagcttcaaaatctgggaaagacgtaacggaatatcggcaaaattggctaccagctccagttcagagtgctgaacctggcggaccaggttatcacgccagttctgatcttcatggcgcgagttttccagcggcggattcaccagcagctcacgcagcggctcgatcatgctaaatggcagacagatgttaaattcaccggtcagattgccgatctccacatgaaacggcgtattaacgacgatatcgttcggcgaggtggtgatattggtaaatttcacctgcatttcggaacgcacatactccacttccagcggattaatggctttccatgcgtcgctatagccttccagcgccagtttcagcatacggttgatgacacgctgttccgtatgggtaaactcgcggccctcgactttggtcggaaaacgaccgtcgccgccgaacaggttatcgacggcaataaacaccagactcggcgagaacaccaccagcccggtgccgcgtagcggcttcaggtggatcaggttcaggttagtcggtaccggcaggttacgcgcaaattcgtgatacggctgaatacgtatggcgcccacggtaatatccgggctgcggcgcagcaggttaaataatcccatccggaactggcgtgcgaaacgctcgttaataatctccagcgcctgcaagcgttcacgcacgacgcgacgctgggtattgggatcgtaagggcgaatatcgctatcgcttgcgataccgggagtgggttcgtctttggtgtcgctgtcgccgttcaacagcgcatcgatttcagcctgagaaagaatactatcgcccatatcgttaccgcagaataaaagctgtataaagcacgtcagtgacgacctgttttggttgtccggcaacgagcggcgcggccagagtctctttaatggcggcaatcagtttttgtttgccagcttctgttgagagctcggcggcattctgacgggaaaacaacaacagcagacggctgcgcacttccggcagatattcatttaatcgcgcgcgcgtcgcttcgtctttcagacgcagggtcacgccgatatacaacacgcgatccgcatcgcccagattgacggtaaacgtatccagcgcaaaaaataccggcgcgggcggcggagccggttccgctttagcgttcgtggtcggttgctgctgcatacgccagtagctataaccggcggtcgcgcaggcggcgagggtaatcaacaccagcaaaggtatccaaatcgagcgtttgctctttttgttaatcgcggagtcagtcatctgatacgggcttcctgtttcggtactgcttattggctgattatcccgtgtcctgtccacgacaaagcgtggaaaagacgcggataatcatgctacctctggcgttaggcgaagatatccactgcgccattgccgcgcgcggcggcctgaagcgaggccggcgccgctaacgctatgtcatcttcagcgccaaacgcgtccgtgtgttgggcgcggccagactgttgttgcgatgaagactgctgctgtccggcaaagctttcgctactgatactgctttgtcccaactgaatgccgctttccgccaactgggtgcgcaacatgggcagggcggcttccagcgcggcgcggacatggctgtgcggcgataccatctggagctgcgcctgattgtcatccagcttgagcgaaatatgcacctgacctaactcttccggatgcaatcgaagctgcgcgctttgctgtccctgacgcgtaaataacatgacctgctgactgaacgtttgctgccattcatggctgcctaacggcgcgctgagtaccggggctgaggcgacaggtagcggttgcgccgtggcgctgctgagcgtcggcattgccgcgccatgcgttactggcgcgggcgggctatccacctccactttcgcgctggtcgcggcggcagcgaccaccagcggcgtcagtgatggccccgtggcgcgatcgtcgctggcgcgcgcaagcgacgcctcggttttccctttttcatgctcgctaaaagagagcgtatgtgtctcttcctgcggcgccgatggcatgtcgccgcgcaacagtgacggcaaggcgatgtgattttcagccggcgtctctccggcgacaggcgtcgcgacaggttgtccgggcagcatggcgaataaggcgctcagactggcaagatcctcatcgctcagcgcgggcgttttctcatcatgctgcgccgttttactcaatgcggccagagcgctggttttcaacgatggcgttagcgtagacagtagatgctgcgcttgtgtcagatcggtaagcgtttcatccgtcgcattcgctttttgcgccagcaggtcggcaagcttcaccgcctggcccggctcgccatgttgggtcagtagctctttcgataacttgccgcctgccgcctgtaaatcggccagcgtgatgcgggcgtctttgccctgtgcgccgtctgcgcctaacgcgcccgccaggagcgccagaaagtcctcggctgaaccggtggtttttcctgacgtcagacccgcggtcatgtcggtatcggtggtgatcagttggggcagggtgatcattcgggtttcctcattgctgcacgctgagcaaattcatccatctttttctgatccatgcggttttcagctaacagcgctgccgcggtttgtcggtcctgtaaggtttgccaggcctgaagtcgctgctttttctcacgccagctcttcagcgccaggtcgactttttgcgtccactgcgtaagctggaggcgatgctgctctatcgccttttccagtgtctgaataaactgctgatagttgatccagcgattactggcgatgccgttgcccatatcggtgttcaaattactgcgatactcattctgataatcgatcagcattttgagctgttcttccgcctgttggcagccgcgacgcatttcgcccagtaaacgcgccgcgtcatctacctctttttcggccagatctttgagtgtttccagagcgccatgttgtgccatgatcgtcgccctcctgctttatcacaccgtcgggaaaattaaatcgagcgcctgcagagagtcttcccagtcggcccgttcaaaaatgccttgctgtaaaaacgcttccagttgcggccataaggtaatggctttatcgagcatcggatcgctgcctttggcataggcgccgacgctgaccagatcgcggttacgctggaaactggaaagcaactgtttaaatagccgtacccgcgcatagtgctgctcggtaatgagcgcggtcatcgcccggctgattgacgcctcgatatcaatggccggatagtgcccggcctccgccagacggcgggacaagacaatgtgcccgtcgaggattgcgcgtgccgagtcggcaatgggatcttgttggtcgtccccctcggtcaacacggtataaaacgcggtgatagagccgccgccgtggatgccattaccggcacgctcgaccagcgccggcagctttgcgaacaccgagggcggataacctttggtggctggcggttcgccgattgccagcgcaatttcacgctgcgccatcgcatagcgcgtcagcgaatccataatcagcaacacatgctgtccgcgatcgcgaaaatcttcggcgatgcgggtggcataggcggcgccctgcattcgcagcagcggtgaaacatccgccggggcggcaatcaccaccgaacgcgcgcgaccgtcggggccgagaatattttcgataaaatctttaacttcgcggccacgttcgccgataagtcccacgacaatcacgtccgcccgcgtgtagcgcgccatcatgccaagcagaaccgatttaccgacgccggaaccggcaaagagtcccatacgctgaccgcgccctacggttaacaacgcgttgatagcgcgtacgccggtatccaacacatgttcgattggcgttcgctgtagcgggttaaacggcggcgtgattaacgcgccggtttccagcgtatccggcgcaggcagtccgtcgagcggtttaccgccgccatccagcacccgaccaagcagggccgggccgagcggtaactgtttgccgctttgcagaccgtcgccatgcccgttacgggcgtaaacgcgggcaccgggcagaatgccttcaacctcttccagcggcattaaaaacagacgctggccgttaaaaccgacgacttccgattccacctctttggtttcagggccgtcctggcgctcaataatgcaggtggcgcccagcggaagctggagaccggtggcctccagtaccaggccagtggcgcgggttaaacgtccataacgacgcaccgccggcaataacgccatttttgcttcaaagttgtcgagcgcggtaagccagcgggtcaaacgcgtggtcatcagagcactcccggcgccgccaggcgacacaactcttgccagcgagtagcgacgctggcgtccagatcgccctcatcggcagagactttacacccgccgtgatgcaacgttggatcgccgcgcaaccgccatccgtgaagactgagcgtggcgcccagcatctcttccacccgctgtaagtcgtccggatgcacgcgcaactgcggcttgccgctaaagagcggctcttgctgcaacagttgttggatctgtttaatcagcgctgagttgtccaccgccggcgtttggccgatgacctgacgcgcagcctccagggccatttgcatcagccgtgaggcgataacgctatcgagcgcgtcaagcgtgttctgaaactcgctcactaactgctgcatacgggcatgaatcggcgcctgctgcgtctgcgcctgagcttgtccttgctccagcccctgcgctaacccttcctggtatccctgcgcgtgtcctttttgccgtccctccgccagcccggcgttataaccttgttcatgggcctgtatttttagctgcgccagctcctgctccagctgctgttcggcagtgagttcgggctccggcgtatcgtctgtcaaggtcacgttatcagcctcaaccggcacaaacgtctccggcggcggggcgagatcgtcgggggtccagacttgccaaggcaattcattagacataggtatcctcgccgctgccaatcaccatttcgccggtttccgccagacgacgcacaataagcagaatcgctttctgctcgttttccacctgagacagacgaaccgggccacggttggcaaggtcgtcgcgcaggatatcggcggcgcgctgggacatattgcgcaggaacttctcgcgtaatggcggttcggcgcctttcagagcgatcagcagcgattcggaatccacttcctgcagcagacgctggatactgcgatcgtccacatccaccagattttcgaacaggaacatctcgtcgatgattttctgcgccagttcgccgtcgaattcgcgcacagcggtaataaccgcttcttcctgctgcgttttcatcaggttgataatttccgccgcggttcttacgccgcccattttgctgcgtttcaggttctgaccgtcgagcaggccattcagcacttcggtcaactccgccagcgccgccggttgtacgccgccaaatgtcgcgatacgcagcatcacatcatgacgcagtcgttcgtcaaacagcgccagaatatcggcggcctgactgcgtttaaggtggaccagaatggtggcgataatctgcgggtgttcgtcgcgaatcaggtcggcggcgctctgcggttccataaagttgagcgtttcgataccgctggtggtatcgcgcgtttccagaatatcttccagcaggctggaggcgcgttcttcgcccagcgctttaaccagtacggagcgcaggtattcgttggcgttgatattcagcgcggcgaactgctccgcttcttgctcaaactctgatagtacgtccgtcagttgtttgttggagatctgacgcacgttagccatcgccgtacttaacgcctgtacttcgcgggttgagaggtgtttaaacacctctgccgcccggtcttcgccaatggtcatcaacaaaatgacgcttttatcggtaccgctaagattactcatgatcgttactcatccactggcgaatgaccagcgccacaacgcgcggatcgttgtctgacatttcgcgaatacgctggctcatcacctcagcgcccagacgctggttagcccggcgttgctggagctgctcgtctttgctaaggcgtacttccacggcttcttcggtttcctggcgaacctgtgcctgttcctgcgccgctttcgcttcttcaacgcggcgcgtcaactgcggacgtaccgctttgcgccacagaatccaggccaccaccagcaccagtaaccagcgacctgccgcgagcaactgatcgataaagaactgctgttgccagaagggcagttcgccgccggtgttatccactgcgctaaacggtgaattcaccacgtttagcgtatcgccgcgtttatcagaaaaacccatcgcttcacgggttaaatcctcgatctgtttcatctgatcggcggtcaatggcagcggtttgccatccgccagcgttttgtaattcaccacgacggccacggagagacgctcaatatcgcccacattcattttggtgtgacgaatggtgcggtccacttcgtagttactggtttcattacgctgcgtattgcgcgggccagcactgttactgttggtactggtgctggtttgtggcgtattctgcgcgttttgttgattggtcggcggcgtggcgatcggcgcctcgttaggcggcgctggttggttcgacagcgcgccaggcacgccgccgggatagcccgcgcctacctgttcgctaatattcaactgacgtgaacgcagggtggccttcgacgcatcgccgttcgggctgtagtgctcttccgtctgctctttattggcaaaatccaactgggcggttacctgagcgtgaacattaccgttcccgacgataggcgacagaatggcttcgatacggcgttggatgcggctttccacatcattagcaaattttaattgcgcgtcattaaggtcgcgaccgctggtattggattgcgtgagcagatgaccggattgatcgaccagagtgacgtttcctggcggcaaaccggcgacagcgctggaaaccagatgtaccacggcgctaatttgtccttcatccagcgcccgacccggttccagtgtgacggtgacggaggcggaaggggatttttgttcccgcacaaatagcgacggctttggcatcgccaggtgaacgcgggcgctttttaccggacccagcgtctcgatcgtccgggccagttcaccttccagtgcgcgctgataattcacctgctcgctgaactgactgataccgaatttttcctgatcaagcagttcaaagcctaccgcgccgcctttaggcagcccctgctgcgccagacgcagacgcagttcatgcactttgtcggcgggcacttcaatcgcgccgctgccattggcaaagcgataggggatattcatctgggtcaactgcgcgacgatcgcgccgccgtcctgatcggaaaggttgctaaatagcgtgcggtaatcgggcgttttggcccacagcaccatcgcaacgacgatcgccacggcagcggaacccgccacaattaacggaattcggggattcgcgcgtaggcgattaagccactcgagaggtttaggttgggttgcagtcgatgcagtcgcactcatctcgcacctcgtgactgatcgtggacggcgttttttgcaaagtggaacaagactcactcccgggtcagcaaactcgaaaaattgacggtctcattatttgtggtttcgaatttttctatgcgctaaaaaccgaggttttttatcgttatttaacgcctttatcttattgacaaactggtaatctctgctgcgtaaaaaatcatccaggggaatagcatggcagcaatacaggggattgaaggggttattagccagttacaggcgacggcgatggccgcgcgcgggcaagacacgcactcgcagtcgacggtgagttttgccggccagctacatgctgcgctggatcgtattagcgacagacagacggcggcgcgcgttcaggcggaaaaattcactctgggtgagccgggcattgcgcttaatgacgtgatggccgatatgcaaaaagcgtccgtctccatgcaaatggggattcaggtgcgcaacaagctggtcgccgcgtatcaggaagtgatgtctatgcaggtttaagccagggctgacaacacatccacagcgaactcccgggcgcttacctacgtcagcgacggggacgcgacgcccatgcaaccagtgcgtgattatgtgggcttgttttttgcgaggcgcgctcattttattgataagcgggttgcacattgttgcagggacttattaaaaatagggtacgcctgtttactgacgccgttcattcctactattcgttctgacgctattgtcattgagtttgcaatccagaatgttcctgcaatatatgcgccgttgcgataatacacggtaaattctttattaatgcctggaatatctgtttcatggagatccagtatatacccatacggggacagattatcagcgagacagcgggcaatggcgctcggatgtgcattgaccactgtgacgggtgaataacgggcagcggcaagacagacgactccagtaatggagatgaaaataatttttatcatttttttggcttctgctgtgcataaataaatcatcacctgatgatgtcagtgagtaaaaatataaatacctgatagtcttttatggcgtagagggaaaataataattattttatgttttgcttaaaatagtcatgggtttttcatcggctcaaacaaaattaaaacggtatacgttatataatagatttatgccacggcgcacaagacgaccttgtctgatttcttttatgcgttttagatttttgccggttatgccgtaaaaggtctcccgccgtaacgtacagcgggagtatgcgcttatttttgaatcagataacgaattgtcgggccatcctgttggatatccagcaccgtataaccgtgattgcgcgcatccagtggaatattattaatggattgcggacagtcgctcaccacttccaggatctcacctttttttagctgcggcatcgcttccagagtggcgaccgccgggtacgggcaaggttcgccaaccatatccagacggtaatcagggacgatatttttcatacagattccttagcaggcgtcagccccgcacggcggaaaaaacgtttttcccagccgataattaacatcagcgcggcaaataataacaggtaggtgaccagcagaccccccagcggaccaaaggtattcagcaggttaactttatcccaactggtcgccagcgcgggcgcgaaatcatcccagtagtaagccaggatggttgaaccgatgacattgccgaggcccacccaccaataatgcacctggccttctacggcgcggtacatccagccggtttcgcagccgcccgccagcacgatgccaaaaccgaacagcagtccgccaatgaccgcattcgggccagcccacataattttaggtgcaacgcccaactgcacgtagctgaaaataccaatggcgctgaccgccatgccgaaaataatcgctttcgccatatgggcgcgtccggagatccacagatcgcgaaaggccgaagtaaagcagatttgcgcgcgctcgatcagcagcccaaacccgacgccgaacagcatcgccagccccagtttcggctgatgcattgccgttaataacgcccagccaatcatgccgataaagaccagcataccgagcctgaaacgccgtcttgcctgatccggtttctgcgtcagtggcgaagccgcggagaccttctgcattttcaccggtatgcgaaatatcggcagcaacgtaaagcgggcgccgaaccaggagccgatagcggtcgctagcgcaaagaaccacgcgtgtagggagaactgcgggatcccggtaaaaaaggcggccaggttacaccccatcgccagacgcgcgccgaagccagcgatcatgcctccgaccaccgcctgtacgatacggattcggctgcgcggcatacgcagttttacgttgttggcccacagcgccgcggcgaaacagccgccgaacatgccgaggatcatcatgccgtcgatacgcgtcagcggcgtaccttccagatgaatcagcttgtagtagccccactgttcggcatgaacgccaaaaagctgcaaaatttgcccgccccagcgggtaaattcgcccgtcacggcccaaaacgtgccggtgatgccaaaatagtaggtagagagaataccggctgcgatcaccgcaggggccggcgcccagaatttaattaaccaggtttgcttgaagtgttgccatgacatgtgtttagcctctgaactcagaaggtgtgaaacaagaagtgcgcatactacaccgatcacagaatttgcctacacctaataagcggtaataccgactggatcaaattgcggccagcgcctggaaaggctggcggcgtcagggctttaatgccacaattcctctttcttctgatgcaggatgaatgatgaaaaaagtagcgatcgttggcgcattgctggttctggccggatgcgccgaggtggaaaactataatgatgtggtgaaaacgcccgcgccggccggtctggaagggtactggcagtcaaaaggcccgcaacgtaagctggtgagccctgaagctatcgccagcctggtggtgactaaagaaggcgatacgctggactgccgccagtggcagcgcgttattgctctgccgggcaagctgaccatgctctccgatgacttaaccaatgttacggttaagcgtgagctctatgagattgagcgcgacgggaataccctggaatatgatggcatgacgctgcaacgggtcgctcgtccgacgccggagtgcgccgccgcgttagaaaaaacgccgctgccgacgccgctgccgtaatttcgcttcccggcagcgctctgccgccgggaacgctcatcacacgtcctcaatgacccacacgctgacgctgcctgcgttgcagaagaacgtcgcttcgccttgatcattagttacaacatgctgactgcggtttcccagaaaatcacgccaggtcttgttagcgtaattgtcgccgagcaggagggttttttcaccgtcgtcgccattggaaagtacaaccacacagcctggattctcttcagtaccgctgcgactaaaggcgatacagttaggatgatcgaaaaagagtgtttgtataccgtgcgcaaaacgctgacgagcgaggatcagccgatccagttggttaatcaccggcatgtcgacccgacaggtctcgccattttcgccattatcctcatagctggcgccgtataaatcgggataaaacaccgacggtacgccgttttcacgaagcaggatcagcgcataggccaatggtttgaaccagggttctaccggcgcttccagcgcctgtaacggttgtgtatcgtggttagcgaccagcgtcaccgcatgaaaagggtcggcttctaccagcgtgccggtgaaaatgtggcgcatgtcatactccgcgccctggcgcgaggcttcatgaaatttcatctgcaacggcgcgtcgaacagcatggttttcccgtcgacctgatcgatgtacgtttgcagtttatccacttcatgcgaccagtattctgcgacaataaacagcggttttggcgcaaccgcctgtacatgctcaatccattctttataaaaccaggcgggtatatgttttaccgcgtccaggcgaaagccgtcacagtgggtttgttccatgacccaacgagcccaatatttaatctcttccgtaaccgcgtgattgcgaaaatcgatattttcccccatcagatagtcgaaattacccagctcatcatcaacctgatcgttccagccatcgccggtatagtcattgacgatcttaaaaatgccgtcttcgtcgggattctcgatgtgatcaatgccgctgaaacagtgatagtcccaaataaagttggaatactggcccgcgcgggcagggaaggtgtagcgcgtccagccttcgcattcaatgatgttgtcatcgatttgcgtgcggtcatcctgattcacgcgctgaacgcgaatacgttctttttcgtctgcgcccagtttgtggttcacgacgacgtcgagcagcaccgcaatattattttttttgagcgcgtctatcgccgtcagtaactggcgtttatcgccgtactttgtcgcgatagttcctttttggtcaaattcgccgaggtcaaacaagtcgtaggtatcatagcctacggaatagccgccggaggcgcctttacaggcgggcggtagccagaccatattgataccgatatcattcagcccatcagcacgttccgccagctcagaccagagtttaccgccgtcgggataataccagtggaagtactgcaataacgtggggtttttcatcttccgtgctccagaagtcgtttagccgacctctggagtatggaagaattttcatacgagacgggaaaatattatgaggcgccaggcgcgtctggcacgagtaacataccggaaagacggccataagcgttgttgagtgatttttggcgggtggattgtccgatcaaactactgagttcatccagtcgctgttgcagcagccctttcaggagctgctcattatccagcgtttgtttgatgtatccggcgaccatatcctgaatacttcgcgtaatgcccggtggagtttgcttttccatcaccgtttcaatactttgcagataggagacctcttgttgcagtaagagatcccattcacctcgctgcgcaagttcaagcagcgattgactgagcagcgcaatacgctgccaacggttgataaactccacggttgaggtcattaacgagactcctggaaagatgctttcggtgaaatctgcttccaggcttctgcaatattgctgagtaacccttccacttcttcgatggcctgagcgtcgttacgcaaattagcctgcagtaaacggcgaatcatatagtcgtatagctcggaaagattcgtcgcaatctcaccgcctttttcctgatcgaggccggctttcagcccgttatcgataatattgatggctttgcttaacgcttcacctttcgcgacaacatcgccttgttctaaaaacaggcgagcgcgcaccagagcgctattcgcgccatcaaacaacatttcaatcaactgatgcgggctggcgctcatcacggcgctttccacgctgacttgcgcataagctttgataccgctcgcggtgtacatggtaacctctgttatcaggacttgttcatagcattaaattgctgggtcaaataagtactggtgttattcagcttactcatcatggtatccagttgggtaaactgggccttgtaacgggcaacggtgtcgtcaatgctactgctgacggtcagatattgcttagtcagctttttcagcgtggcgttaatactgtcctgggcgctgtcaataatgccgtcatcggccagataacttttcacttcggtggcaattttggtggtgatccccgtttctttaccatcacctaccagcagctcacgtacagaagcggtattttcatccagcgcttttttaagcttggtatcatcaatttttagttttccggtggtaccatcagaagtaataccaatttcattcagggtcttaaatgtacctgtacttgcaccattagcgaactgagcgcggattccagtttgaatcgttcgcaccacggtatctccaagtagtgcaccgttgtttttgtcctgttcttcagcccctggatcaacctctgtatattttgttaatgaactaaaggtatcaagcagtgagttgtaggcatcaacccaacctttgacggcttcggtcgccttttcattatcttttgtgacggtaatacgggcatcttttacttctttggttagttcaagcgtcacgccttgtggagcgtcagtgattttattactcggtcgctcaatatcaatgccgttaacggttaacaaagcattatctgcagcaaccagttgcttcattttgcccgtgccagtactactatcataggacaacagatcgctgagtttgctatcgccttccacagagatagtcatttgattatccgtgccactatctgcggtcagtacaagctgataatcgccttctttaactttaacgatactggcggaaataccactgtcagcatcattaatggcgtcacggataccctctaaagaggtttgatctttagtgagcttgatttcaagtggttctttacggcctttctgttcaatttttatggtacggctgtcagatgtggtatctcccagcacttctttggtagatgtaattttggttgctgtactcaaagattgtgcttgtgctaactgagttacgctaaccacataagttccaggtgcggccccagcttccgtcgagactttcaggtcttctgtactgctggtgacattcgtacttttaaacagatcggctttatttaacgccgtgtttgctgtttgaaacttctccagtgcactttttaaagtaccgtatgccgttagacgggccgtattagcactctgctgctgtgtgatcggcgttaagcgtcctttttcagcgttggtcagtttagtcagcagtgaatccagaggtaagtttgaccctacacctaatgatgaaattgaagccatgccatcttcctttcgattgcaaacagtagttaaacgcgttatcggcaatctggaagcaaagtttaatgataattttgcaaaaataatgcgtggaataatgatgcataaagcggctatttcgcaggctaagaaaaagatcgggggaagtgaaaaattttctaaagttcgaaattcaggtgccgatacaagggttacggtgagaaaccgtgggcaacagcccaataacatcaagttgtaattgataaggaaaagatcatggcacaagtcattaatacaaacagcctgtcgctgttgacccagaataacctgaacaaatctcagtcctcactgagttccgctattgagcgtctgtcctctggtctgcgtatcaacagcgcgaaagacgatgcggcaggccaggcgattgctaaccgcttcacttctaatatcaaaggtctgactcaggcttcccgtaacgctaacgacggcatttctattgcgcagaccactgaaggtgcgctgaatgaaatcaacaacaacctgcagcgtgtgcgtgagttgtctgttcaggccactaacgggactaactctgattccgatctgaaatctatccaggatgaaattcagcaacgtctggaagaaatcgatcgcgtttctaatcagactcaatttaacggtgttaaagtcctgtctcaggacaaccagatgaaaatccaggttggtgctaacgatggtgaaaccattaccatcgatctgcaaaaaattgatgtgaaaagccttggccttgatgggttcaatgttaatgggccaaaagaagcgacagtgggtgatctgaaatccagcttcaagaatgttacgggttacgacacctatgcagcgggtgccgataaatatcgtgtagatattaattccggtgctgtagtgactgatgcagcagcaccggataaagtatatgtaaatgcagcaaacggtcagttaacaactgacgatgcggaaaataacactgcggttgatctctttaagaccactaaatctactgctggtaccgctgaagccaaagcgatagctggtgccattaaaggtggtaaggaaggagatacctttgattataaaggcgtgacttttactattgatacaaaaactggtgatgacggtaatggtaaggtttctactaccatcaatggtgaaaaagttacgttaactgtcgctgatattgccactggcgcgacggatgttaatgctgctaccttacaatcaagcaaaaatgtttatacatctgtagtgaacggtcagtttacttttgatgataaaaccaaaaacgagagtgcgaaactttctgatttggaagcaaacaatgctgttaagggcgaaagtaaaattacagtaaatggggctgaatatactgctaacgccacgggtgataagatcaccttagctggcaaaaccatgtttattgataaaacagcttctggcgtaagtacattaatcaatgaagacgctgccgcagccaagaaaagtaccgctaacccactggcttcaattgattctgcattgtcaaaagtggacgcagttcgttcttctctgggggcaattcaaaaccgttttgattcagccattaccaaccttggcaatacggtaaccaatctgaactccgcgcgtagccgtatcgaagatgctgactatgcaacggaagtttctaatatgtctaaagcgcagattctgcagcaggctggtacttccgttctggcgcaggctaaccaggttccgcaaaacgtcctctctttactgcgttaatccggcgattgattcaccgacacgtggtacacaatcaaggcagcgaaagctgccttttttaattccggagcctgtgtaatgaaagaaatcaccgtcactgaacctgcctttgtcacccgcttttcctgttctggctcggcctgccgcgatcactgttgtaagggctggaaaatcacgctggataagacgacggtcaaaaagtaccttaccagcaaggatgtaaccatcagagagattgccaaaaatagtattattcttttaaagaaagacccaaataactggggggagattaaattaccatctgggacaggaagctgcccttatctggatgacgatcgtctgtgcaaggtacaaaaaacactgggagctaaagcattaagttatacctgcactacgtttccgcgggtgttccatacttataaaaacgaggtacgacattctctaagccttgcctgcccggaagtgactgcgcatattttaaacgatactgatgcggtaacactcaatgaaaaggcgatcattcagcagaagtacaataccgcgccgctattctccccacagcaaaaactacttaacttgttttgcctgagtttgattaaccatgctgccagcaatccggatgcggcattatacgcgttgatcaagtttgtaatgtacgtgcagaagtttccccggattgatgacgctgcattaggggagattgagcaagtgtatggcacgttagtttcccagttgcagtccggttcgttaactcaggaactcgctaatattacgccggataagaaattcaaaacatccctggtactgttgatgcaggattatttcagggctctcccaccgagcagaggaagctatgtcctcgatcactatatccagtgtcttctgcgggtgctgacggcggaagagggcgtttcaatggagcagaaggttagcgatattgagtcctcattagcgcgctgtttacaggcggatgagcagcagaagaactgggccttcagaaatttaattctctataaaatttgggaaaataatttccccaaccagccgaatgtcgacccgttacgcgcgctgtatattatcgtggcggaatatgcctttattaagctattaacggcagccagcgtgcatgagcgcgggcggcttgagtgggatgacgttaccaatattgtgtatagctttcactcccgcagccagcataacagcgaggtggcggcgaattttcatcgccatatagaaacggtgcgtactggcgacgatctgtcgatgattcatcttctgacatagttttgttcggggtgggcttttgcgcatcccgtttatcctatctggctgattttattctgctctttgaaccgctaaaaaggcgctacaggttacataagtgaaataacccttcttttatagccttattccttcgatagaaccctctgtagaaacggataatcatgccgataactcatttaacgcagggctgtttatcgtgaattcactgtataccgctgaaggtgtaatggataaacactcgctgtggcagcgttatgtaccgctggtgcgtcacgaagcattgcgcctgcaggtgcgattgccggcgagcgtggaactggacgatctgctacaagcgggcggcatcgggttattaaatgcggtcgaccgatatgacgctttgcaaggaacggcatttaccacttacgcagtgcagcgtattcgtggggcgatgctggatgaattacgcagccgcgattgggtgccgcgtagcgtccggcgtaatgcccgcgaagtggcgcaggcgatgggacaactggagcaggaactggggcgtaatgcgacggaaaccgaagtggcggaacgtcttggcatccctgttgcggagtatcgtcagatgttgctcgataccaacaacagccaacttttctcttacgatgagtggcgggaagagcatggcgatagcatcgaactggtgactgaagaacatcaacaggaaaacccgttacatcaactgctggagggcgacctgcgacagcgggtaatggacgcgattgaatcgctgccggaacgcgagcaactggtgttaacgctgtattaccaggaagagctcaacctcaaagagattggcgcggtactggaagttggcgaatcgcgggtcagccagttgcatagtcaggccatcaaacgattacgcaccaaactgggtaagttataggtcgcgcatggtcgcacccgaaaagtgccgcacaacgtatagactaccaggagttctcatgacggtgcagcaacctaaaaggcggcccttgagccgctatcttaaagactttaaacacagccagacgcattgcgcgcattgtcacaaactgctcgaccgcattacgctggttcgccgtggcaagatcgttaataaaatcgctatttcacagctggatatgctacttgacgacgctgcctggcagcgggagcagaaggagtgggtggcgctgtgtcgcttttgcggcgatttgcactgcaaaaagcagagtgattttttcgatattatcggtttcaagcagtatttgtttgaacaaaccgagatgagccatggcacggtgcgggaatatgtcgtgcgtttacgacgtcttggcaactacctcagcgagcaaaacatttcccacgatctgctgcaggacggttttctcgatgaaagcctggcaccatggttgccggaaaccagcaccaataattatcgtatcgcactgcgtaaataccagcaatataaagcgcatcagcagattgcgcccagacagaaatccccctttaccgccagttctgatatatattaaaaaagcataagatgtagcagagtcgtgttggtgaaacgtggcaaaccttctacattaggctgagtcccccaaaggttcgcgagacgtgacgatgcgccatggcgggacacagtctatggtcattaacggcaatattcggggttactatgaaattagcactgctgggacgtcaggcactgatgggagtaatggctgtagcgctggtggcgggaatgagcgcgaagagctttgccgatgagggtttgctgaacaaagttaaagaacgcggcacgctgctggtagggctggaaggtacctatccgccgtttagctttcagggcgacgacggcaaattaaccggttttgaagtcgatttcgccgaggcgttggcaaaacatctgggcgttaaagcgtcgttgaagccgaccaaatgggacggaatgctggcgtcactggactctaaacgcattgatgtagtgataaaccaggtcacgatttcagacgtccgcaagaaaaaatatgatttctctacgccttatactgtctccggcgttcaggcgctggtgaaaaaaggcaatgaaggcacgatcaaaacggcggccgatctgcagggcaaaaaagtcggcgttgggctggggactaactatgaagaatggctacgtcaacatgttcagggcgtggatatccgtacttatgacgatgatcctacaaaatatcaggatctgcgcgtaggccgtattgacgcgattttagtcgatcgtctggcggcgctggatctggtgaaaaaaaccaaaggtacgctggccgtcaccggtgatgcgttttcgcgtcaggagtccggcgttgcgttacgtaaaggcaacgaagacttgttgaaggcggtagataacgccattgcggaaatgcaaaaagatggcaccttaaaagcgctttccgaaaaatggtttggcgctgacgtgacccaataatgctctacgttgcccggcaggcagtgcgccgccgggcaatatcaacctcatactatgtcagcaaacggaggcgcgtgaatcggcgccttttttatttccgttagatcaacgtgcataataaaaagaacacaccacaacgttaccggaggctcaatgccactacatcacttaacgcgctttcctcgcctggagcttattggcgcgccgaccccgctcgaatacctgccgcgattgtctgattatcttggccgtgagatttacattaagcgcgatgacgttacgcccattgcaatgggcggcaataaactgcgtaagctggagtttctggtggccgacgcgctgcgagaaggggcggatacgctgataaccgcaggggcgattcagtcgaaccatgtccgtcagacggcggcggtcgcggccaaattggggctgcattgcgtcgctttgctggaaaatccaatcggtaccaccgcggaaaattacctgacgaatggtaatcgcctgttactggatttatttaatacgcaaattgagatgtgcgatgcgctaaccgatccggatgcgcagctgcaaacgctggcgacgcgcattgaagcgcaagggttcaggccctatgtgattccggtcggcggctccagcgcgctgggggcaatgggatacgtagagagcgccctggaaatcgcccagcagtgtgaagaagttgtcgggctctcttcggtggtggtggcctccggcagcgccggaacgcacgccgggttagctgtcgggctggaacatctgatgcctgacgtcgaactgattggcgtgaccgtttcacgttctgtcgccgagcagaaacccaaagtgattgccttgcagcaggctattgccggtcagctggcgctgacggcgacggcggatattcatttatgggatgactattttgccccgggttacggcgtgccaaatgacgcggggatggaggcggtgaaactgctggcgagcctggagggggtgttgctggatccggtatataccggcaaagcgatggcgggtctgatagacggcatcagccagaaacgctttaacgatgacgggccgattctctttattcacaccggtggggcgcctgcgctgtttgcctaccatcctcatgtataacctccaggtaatcaacgcgaatgcaagaaagtatccaactggttattgaatcgctgccgtatttgcttaaaggcgccgtctttaccctgcaactgagtattggcggtatgttttttggtctgctgctgggatttgtgctggcgctgatgcggatgtctccgctatggctggttcgctggctggcgcgcttttatatctcgatttttcgcggtacgccgcttatcgcccagttatttatgatctattacggcctgccgcaatttgggattgagctggaccctatcccggcggcgatgattggtttatcgctcaataccgcggcttacacgtccgagacgctgcgcgcggcgatctcggctatcgacaaggggcaatgggaagcggcggcgagcattggcatgacgccgtggcaaacgctacgtcgcgctattttgccgcaggcggctcgcgttgcgcttccgccgttgagcaacagctttatcagcctggtgaaagatacgtcgctcgccgcgacgattcaggtgccggagttgttccgccaggcgcagttaattacctcgcgaacgctggaggtgtttaccatgtatctggccgcgtcgttaatctactgggtaatggcgaccgtcttatcggcactgcaaaactattttgaaaaccagcttaaccgccaggagagagagccaaaatgagtgcgatcgaagtcaccaacctggtcaaaaaatttcatggtcaaacggtgctgcacggtatcgaccttgaggtaaagcccggagaagtcgtcgccattatcggcccgagcggctcagggaagacaacgttattacgctgcattaacctgctggaacaaccggaagcgggcaccattaaagtgggcgatattatcatcgataccgcccgcccattcagccagcaaaaagggttgattcgccagctacgtcagcatgtcggctttgtctttcagagttttaacctgttcccgcatcgtaccgtgctggaaaatatcattgaaggtccggtgattgtaaagggagagccgaaagccgaggcgacggcgctggcgcgggaactgttagccaaagtcgggttggccggtaaagagacccgttatccgcgccgcctgtcgggcgggcaacagcagcgcgtagcgattgcgcgcgcgctggcgatgcgcccggaagtgattctgtttgatgagcccacgtcggcgcttgatcctgaattagtcggcgaggtgcttaatacgattcgccagctggcgcaggaaaagcgcacgatggtgatcgttactcacgaaatgggctttgcgcgtgacgtggctgaccgggcaatatttatggatcaggggcaaatcgtcgagcaggggccggcgaaaaccttgttcgccgagcctcagcatccgcgtacccgccagttccttgagaaatttttagtgaaataataccttttcaacgctcgcccgaattagccgcgcctcgggcgagcgcaatgaataattatgaagtcattctgccagattattaacctcgctctctggcggaagccaaaaaactgtaatgccgctcaagtattctacgtttcgtccgatatttcttatatataaatactatttatgtgttaatttaagctattcataataatgattatcaatatcaaaggcgtgaccataaaatatgcaggaaaatgatttcttcacctggcgacgcgcaatgttgttacgctttcaggagatggcggcagcagaggatgtttatactgaattgcaatatcagacacagcggctggaatttgattattatgccctgtgtgttcgtcatcccgtcccctttacccggcctaaaatatcgcttcgtaccacttatcctccggcgtgggtaacgcattaccagtccgaaaactattttgcgatcgatccggtattaaagccggaaaatttcaggcagggtcatttacattgggatgacgtgctatttcatgaagcgcaggcgatgtgggatgccgcccagcgtttcggattacgcagaggcgtaacccagtgtgtgatgttgccgaaccgggcgctgggctttttatctttctcccgtagcagtttacgctgctcctcgtttacctacgatgaagtggagctgaggttgcaactgctggcgcgggagagtctttcggcgctgacaagatttgaagacgacatggtgatggcgcctgagatgcgtttcagtaaacgtgagaaagagattctgaagtggacggcggaagggaagacctcatcggagatcgccattattctgtcgatttctgaaaataccgttaacttccatcagaaaaacatgcagaagaaattcaatgcgccaaataaaacacagattgcctgctacgctgcggcgacaggtctgatatgacgtgctgacgatgcttcacgccagacgcgaaaccggctgaaagcgatgctaacagccggttttttactactggcggtaagcctgtttaatttgcttaaccgtactggaaaataccgccgcttgtgcttcatcatccatctgcgcgatctgtttttccattttaagaatcacgcgccctgcatcggcctggcccatcgcctgcagcatcagcgttaacatggctttcaggcagttgacttcagtagccagttcttgattattctcagcggtggaaaaatcaggcgtactcatttattttcctcgttatgtttcagtgaaaatgtgcgatagcagatgttaaggcggcggagtataccataagctacgctaaaaatagcagtggttgttttttgatcaaaaagcggaggggttacccacaaaataaacgtttccgcgtgatgcatatattttcttcattctttgtttattacgcgtattttactcgttaattattgttacaaagttgattccctaattagtgtttagacagcggaacgtgaaatttttgtcaccattatgaaatagcagcctggaacagcgccgtcagaaggggctacaacgttggcagttgccacatgacgtacaacataatttccaaaaacgagagcaaaatcgaatacccggtgtttttttacgtttcaaagttgagataaaaccagctaatataaggacgattaactatcagtagcgttatccctattctggagatattcctttgatcaacgttcttcttgttgatgaccacgaactggtgcgcgcagggatacgacgcattcttgaagatataaagggcattaaagttgtcggtgaagcgtgctgcggagaggatgcggtaaaatggtgccgtactaacgccgttgacgtcgtgctgatggatatgaacatgcccggtattggcggccttgaggcgacgcgtaaaattgcccgatcgacagcggatatcaaagtgatcatgctgaccgtccatacggagaacccgttgcccgccaaagtgatgcaggctggcgcagctggctatctcagcaaaggcgctgcgcctcaggaggtggtgagcgctattcgttcggtgtattccggacaacgttatatcgcctccgatatcgctcagcagatggcgctcagtcagattgagcctgcaaaaacggaaacgccgttcgccagtttgtctgaacgcgagttgcagattatgctgatgatcaccaagggtcagaaggtcaatgagatttcagaacagctgaatctcagtcctaaaacggtgaacagctatcgctatcgtatgttcagtaaattaaacattcatggtgatgttgagctgactcacctggcaatccgccatggcctgtgtaatgcggagacgttaacaagccagtgagtgaaatatttgacgcaaaggcgtttttgaaaaccgttaccagccaacccggtgtctatcgtatgtatgacgccggcggtacggttatttatgtcggtaaagcaaaagacctgaaaaagcgtctttccagctactttcgcagcaacctggcttcgcgtaaaaccgaagcgctagttgcgcaaattcaacacattgatgtcacggtaacgcataccgaaacggaagcgctgctgcttgagcataattacatcaagttgtatcaaccgcgttacaacgtgttgttgcgtgatgataaatcctatccttttatttttctgagcggcgatacccatccgcgtctggcgatgcaccgtggcgccaaacatgcgaaaggcgagtacttcggcccatttcctaatggctatgccgtgcgggaaacgctggcgctgttacagaaaattttccctatccgccagtgcgaaaacagcgtatatcgcaaccgctcgcgtccttgcctgcaatatcagattggccgctgtttaggcccctgcgttgcaggactggtcagcgaggaggagtatgcgcaacaggtggagtatgtccggttgtttttgtccggtaaggacgaccaggtcttaacacagctgattgcccggatggaaaaggccagccaggatctggcatttgaagaggcggcgcgtattcgcgatcagatccaggcggtacgccgggtcacggaaaaacagtttgtctccaatgcgggcgacgatctcgacgttatcggcgtggcttttgatgcgggtatggcctgtgtgcatgtgctgtttattcgccagggtaaggtgctgggcagccgcagctattttccaaaagtacctggcggtacggaactgggcgaagtggtggaaacctttgtcgggcagttttacctgcagggtagccagatgcgcacgctaccgggcgagatactgctcgattttaatctgagtgataaaacgctgctggccgattcgttgtcggaacttgccggacggcgtattcatgtccagacaaaaccgcgcggcgatcgcgcccgttatctcaagctggcgcggaccaacgcggcaacggccttaatcactaaactctcgcagcagtccaccatcacgcagcgtttgaccgcgctggcggcggtattaaaacttcctgcgatcaagcggatggagtgttttgacatcagccataccatgggggagcaaacggtcgcatcctgtgtggtatttgacgctaacgggccgttacgcgccgagtatcgtcgttataatatcgcgggcatcacgccgggtgatgactacgcggcgatgaatcaggtgctacgtcggcgttatggcaaggccatagaagaaagtaagattccggatgttattctgatcgacggcggaaaagggcagctcgcccaggcgaaagccgttttcgctgagctggatgtcccctgggataagcatcgtcctttgctgcttggcgtcgccaaaggcgcggacagaaaggccggtctggaaatactcttttttgaaccggaaggcgaggggtttagcctgccgccggactcgccggcgctgcatgttattcagcatattcgcgatgagtcgcacgatcacgcgatcggcgggcaccgtaaaaaacgcgcgaaggttaaaaataccagtacgctggaaactattgaaggcgttgggcctaaacgtcgccagatgctgctgaaatatatgggcggtttgcaaggactacgtaacgccagcgtagaagaaattgcaaaagtgccgggtatttcgcaaggtctggcagaaaagatcttctggtcgttgaaacattgaggccactgtagcaacataggggtaatttcactgacaacagatagttacccgtcactatgcaatttaatatccctacgttgctcacgctgtttcgcgtcatcctgattccattctttgtcgtggtgttttatttgccgttcgcctgggcgccgatggtcagcgcgctgattttctgtattgccgcgattaccgactggtttgacggctttctggcgcgacgctggaaccagagtacgcgtttcggcgctttcctcgaccccgtcgccgacaaggtgctggtggcgatcgccatggtgctggtcaccgagcattatcatagctggtgggtgacgttacctgcggcgacgatgatagcccgcgaaattattatctctgctctgcgtgaatggatggcggagctgggcaaacgcagtagtgtagcggtctcctggatcggtaaagtcaaaactaccgcgcagatggtggcgctggcgtggctcttgtggcgtccgaatatctgggtagagtatgccgggatcgcgcttttctttgtcgcagcggtgctaacattgtggtccatgttgcaatatttgagcgctgcacgtggagatttgcttgatcagtgatcgtttcgccgcaaatttcagcaaacgatcgtgagtgacgaaaaatatcgttgactcagtgcgtcaggtaagtagaatgcaacgcatcgaacggcagcactgattgccagacgataacaaaatcaagtgattaacaaagttgcttgatactgcgggaatagctcagttggtagagcacgaccttgccaaggtcggggtcgcgagttcgagtctcgtttcccgctccagtttaaaagcattggcgtaaagcggatgctggctgaaaagccaaaaaatttggcgcgttaacaaagcggttatgtagcggattgcaaatccgtctagtccggttcgactccggaacgcgcctccaatttttcccgagcccggatggtggaatcggtagacacaagggatttaaaatccctcggcgttcgcgctgtgcgggttcaagtcccgctccgggtaccatgggaaagacaagaataatcaaagcaataagcagtgtcgtgaaaccacctacgggtggtttttttgtgccttcaatttgtatgccgaccgcgagcgtgaactctccagtgcgatacacagtaaaaaacaccggtagcggcatttctgccagtacaacagttatgtgctaccgacccgcaagaacttatgcccggtaaatactaaacgtcgggtaaatcagccgataaaatccattaatctgtataaaaatgctgatatgttttatgcctgctttattaaagagagtaggtctgccagtgaaatataccgataatgcaaaattatttattagcttcattaatattgggattgtaggttgcgcttttttactttttttattttgtatgagcctgagagtgcaatcgtaacctactctcttccaggagagccttcctcttcaacatgtgatgcgcgtaattttattggctacgtcgatgaaaacgactttgcagagtatataaaaaaagtagaactgacgcgctacagtatgtattgtctgaaaaaaacaggggcgggtcagtggagtatttatgcaaattaaacgaatatataactgttcaggggtgttttctgcacaatttaattaaaggtagatagcgaactaatattcatcataaggtaatgtgatccgcatcatgctttaatcacgttttgcaatattgtcttaataacaggtcaactacagataatttcgggttttcgtgaatggcggttttggtcagtctctatattatgctttccccgctttacggagatgatgatgcaaaagaaaacctgggccgttttattgataccattgtgcctcaccgcttgccaccagacgacctaccgatcaacagccaaagatgaaattctcacagggagctatattgacccgaccaaaacacgctttccgttagcggattattcacagtcggttgataaatggatacctccggactcggctgattacactattccggttattgatagtgctacccaacaacgctactttaacgcactaaaatctcattatttcggaatggacagtgaagcgcactcgccgtggaatggtttttatattaccgcattgctgaaaaaaaacgcagcacaggcccgggatgccagtattaagcagtttcttagcgacggcagtgcttattggggggaaaacttcagactttatacctctcgctggaaagaggaggttagagggaatacggatacgcagattgacaatatctataatgcctcccggcgaggcattatggtcagagaaagtttagtcagagcgctgccaacggacgacccgctctttaacgatccccgtcaggcgggcgaggggtatccgtttgataatttacaaatgtcttcgctgcgtcccggtacgccggtctatacgctgacgaagagcaaagaccaacgctggcaatatgtcgtttcaccagcggtaactggctgggttcatagtgaagatattgccagtacggatcagaaatttataacacagtgggttttgctcgctcacaagcaactgggggcatttatcaacgcgccggtttctgtccatgccgcaggcgtctattatttcaccgggcggccgggcactattttaccgttccggcatcaacgggcgggccagttcctcattgcggcgccagttcgcgacagcaacggtcgcgcgtttatccattgggtctggctaagcggtaacgagtttacggctatgccgtggaaaatgacgccggaaaatatcgccgtgctaatgaaagcaatgcacggcgccccctacggttggggaaattttaacttttataatgattgttcagccgaagtccgcagcctgttaatgccgtttggcatattcctgcccagacattcatccgcgcaggtagaggcggctggacgggtggtcgatcttagtcataaaaatccccaaatgcggatcgattatctcaccagatacggaaagccgtttactacgctggtctatattccagggcatattatgctgtatatcggtaacacaaccatgaatgggcaggttatgccgatgacttatcagaatatctggggattgcgcccaaaccatgctaatagccggagcattatcggtgaggcagtatttttgccgttactgcgtttttatcctgaaaatcctgagctgatatcgctggctggtaaggttctgtttaagcttggttatatagaataggttgacaaactgtgttatcgcggaagatatgattaaggcaaccgtgcgcgtggatataaagagagtatccctgtaaactgtgtctgaaaaaagtatgcgctatagtgcgggctgtttatttgaaatactatctggagctgattctggatgtgattatgtgcctcacacattgaagtgagagttattgctggtggtatctggctggaggctgggtggtaaaaagacgtaatttattgcattttaataacggtgcccgatcagagcgcgatcttggggatctggtcactaaagtttttgagaaagcggcgaaaaaagaaccgcaaccgctatacacatttagcctgccgttgctgagtgtgcaggatgagatccgtgtttactgtaagaaaaaaaatatcaaaatagggtacgatacgctgtttatggaaataaccttttctgctgacagagaagcggtagacgaactcattaaacacttttttactgaaaataagctctatttgagagggcggttttatctgtccgcggcggtggtataagttagcatgagtataatatagcgagaaacccatctctcgcttttgtgtggggcgagcgtttcctggcggaaaatctgcgccctgatcctccttttgtgcgttaacttccggaatcctcctcatttcgtgttaatctggcccctgatggttgccatccaaactgcctgcaaaaaaattatttttatccgctgcaatgtaagaggcctacaggcggaagtcatcactgaggaaaagcgttatgaaaatggaaccattaaacgagaacgagctggaatggctggatgatgtgctgacgaaatacaataccgatcaggccattttggatgtcgcggagctggacggtctgattactgcggtactaagttctccgcgtcccatcgagccggaacagtggctggtcgcgatatgggggggacccgcgtacgtaccgcgctggacatctgaaaaagaaatgacgcgatttatggatctggtgttccagcacatggcggacacagccgcccggcttgaagattatccagaacagttcgagccgctgtttggcctgcgagaagttgatggccatgaattaacgattgttgaagaatggtgctttggttacatgcgcggagtgtcgctgtccgactggtctgacttgccggatacgctaaaaccggcgctggaagcgattgccttacacggcactgaagaaaactttgcgctgttggataaaatgagcccggaagcgttcgataaaagcgttgacgctatccgtatcgcggcgcttgagcttcatgcctggtggatggcgcatccgcacacgacgccgctacagatgccgataaaagcagaggtgaaagtggggcgtaacgatccttgtccatgcgggagcggcaaaaaatttaagcagtgctgcctgcattaatggctcgtaaacggccatagcgtgacgattatcgagcctggacggcgtccaggcccggtaatctttgcctggcattaacctggatcgggcagaaaccccagtgcgatcgaaaactggacgccaatcacgacaatgccgcagataaacaccagcgccagcgctggcgtgccgcctgccacacgatatcccgcctgagggctctgtttacggcactgccagaccagcatagcagggatgagcagtgccagcactgccagcgctacgccggcatagcctaatgccatcacaaatccacgtgggtagaaaagtgcaaacgccagcggcggcagaaaggtaatcagcccggtttgcagacgtccggacaccgtactgcggcgctggaatagatcggccaggtaatcaaataatcctagcgctacgcccagaaaagaggtcgccaacgccagatcggcgaacaggtggaccgccagttcgacatgtggcgaagcgaccacttctctgagcgcctgcagcaggccatttaacccggcatggctggccagtagccctctgaatgtcggcgagtcgatacttccctgcgtggcgagctgccaaaaaatataggccactagcggaatggcgctacccgtcataaagacccaacgcagccggcgaatgttgccgttcatataactcacaatactcggtacgcttccgtgaaaaccaaacgaggtgaaaatgaccggtatggcggataacgccagcccctgctgtaaaggaagcgtaagaagatttactttatgaatatgtggcgtgagcaacgcaagcatgatgaccagaaaaatgatctttgcgctaaacaggaagcggttaaaaaggtcgaccagcgaggtgcccacacacaccaccccaccggcaacaaaggtgaacagcagcaccccggcagcgggcgagagcgtggcgccaagccagttattaatactggatgccagtaattctccggctccggaaatgtaggcggcggtgagcgcatacattaagaacatcatactgaatcccgtaagccactgtccgtaacgtccaagatagcgttttgccaacgagcccagtccggtatccgccggaacgtgttgatatacctccagtaatagtagcgcggtataacacatcagcgcccacaggccaatcaacaatcccagcgtgacgctgaaaccaacgccagccgctgccagcggcattgccagcatcccggcgccgatagtggtgcctgccacgataaaaatactgcccagagttctgtttttcacgctttctactaccccggtaacaaagaacggtgatatccgcggcgcagggtaaggcattacgctattttcgtcaaatggtcgttacaatgggtgtactgtaaaatttacagttccgggcataaaagcgaatatgggaggagacgcgggcaaccgccgcaaacctgcgctagcgcaaagtcgctcgcacacggacacattaggctacgagttttattcaggaggggttatggattccattcacggtcacgaagtactcaacatgatgattgagtctggcgagcagtacacgcatacctcgctggaggcggcaataaaagcgcgctttggcgagcgggcacgatttcacacctgttcagcgtcagatatgacggcggcggaactggtcgcgtttctggcggcgaaaggaaagtttattgcggtggaggacggtttttcaacgcatgagagtaaaatctgccgccattaatacgccacggtgagagcgcgtctcaccgtgtaaggacgtgctggattaattttgcgtatccagggtggagagttctttatcaatgaaataaagcccttcgccgctttttcccgccagcgttaatttatcaataatagatttgaacagtttttcttcttcatgctgttctgccacataccactgcaagaaattaaatgtcggataatcctggctggtcattgcggcatgagccagttcattaattttttgcgtaataagctgctcatgctcataggtcgcgcggaacagctcatccagcgaggcgtactcagcgaagggcgaagaaacggtatgaatgcgcggcaggcttccggtatcggtaaggtagtcaaacaggcgctgcatatgcgtcatctcttcttgcgcatggcgacgaagaaatgcggccgcgccttcaaaactgtgatagctacaccacgcgctcatttgttgatagagcagggaggagtacaactccagattcatttgctcattcagtttgtcgatcatttctgttttcagcatggttccgctccacaaatagcaaaagatatacggtaatgtggcgccactataatttgttattttattatttgcaaaaggtaaaatattaaatttaattattaaaaatacgaatgggaataaaacgcattaacgccagtgtatagcgtataaaaataaagaaaagccagcaccttcatgctggcaatagcgaccctgcactctcctccattgtacatggtgtcggcgttaagccagccgccttaataataaagcggcatgatttgcgggacggcaacgccccggcactgccaggagagggtaaatcgggtgttcagacacaacgagcccgcataaatgctacaggttcctaccggctgaccaaacgaaacggcatcggcatagcccatctgctggcattcgcgtgttgcggtcccgtgagatacatagtcatctgtccgtgaagtaaaaaatagcggctggttatacgtcaggcgcacgatgccgcttatcgggctggcttcgctgacctgcgcttgtcgagtaatggtgcatcccgtcagggctagcagtgaaagagtaaaaataagaggcttcataaaatcgctccgacagttcggtatcagaccatgctacctcgtgtcttgcaccgtcaatggctggaataacttacggattcgccttgattaaaggtaacggcaggggatttacagcgggaacagaaaatgtgtgagcgtcttttcatttaatgaaacttcgtttcattaaatttgaatgtgtgttcgcaaatgtgtaatgtgggcaaaacgtcatgatttacgcaggcgcgaccgtctgcattcaggaggaacacgatgaaaattgcactgatgatggaaaatagccaggccagcaaaaatgccatcatttataacgaacttagcgccgtcgccaatgaaaagggatttcccgtttttaacgtcggcatgtgcgacgaaaatgaccatcacctgacgtacattcatttaggcatcatggcgagtattctgcttaatgcaaacgcggttgattttgtggttactggctgtggcactggtcagggcgcgctgatgtcgttaaatattcatccaggtgtcatttgtggctattgcatcgatccggcagatgcttttctgtttgcgcagatcaacaacggcaatgcgttgtccctgccatttgcgaaaggctttggctggggcgctgagctgaacgtgcgtttcatctttgaaaaagcgtttaccgggcgtaaaggtgaggggtatccgcctgagcgcaaagcgccgcaggtacgcaatgcgggcattttgaatcaggttaaggccgcggtcgtcaaagagaattatctggatacactgcgggctatcgatcctgaactggttaaaacggcggtttcagggccgcgtttccagcaatgtttgtttgaaaacggccagaataaagaaatagaagcgtttgtacgtgagatgctggggtaatgcccggacaagacagagacgtttcgcgcctgtcggctggcatgatgtgccgataatacgccagtagcgacaggcgccacctctggcaaacagaccagaaacggtgtaggccggataagctgcttcgcgttgctatccggctaataacgtctcaatattgtcgctcggggagccgctatcagtgatgctgataggtcacgacgttaaggagatgctgatcggtttgcgccagacataaccctgctcgtttagcgctgcgaacttcttcgagaatagtttgtaaaagtacgccatcctgctgctgctctttttccagggtatggagaaaatcgagcgttgaggcatcattcagcgctttcgcttcatctgccagacgcgacagcgtgctggcgcgttgctgataatcctccagggttttctggaacaattcttccagagagcagagctcttcacccggaacgtcaatggctttaacgataggggtggcgccggcgtttttcataaaattaaacatgcgcatcatttgcgtcacgttgccttgcgcctgggtacgaagaaaggtggcggtgcctgttaaactgtgttcagaacaccattcgcttagatggaggtaaagatttgatgcgtaaaactcaaggttcattggcgtgttgagcttttgaaccattcctacagctgccataacaatatccttatttccagaaagtgttgatgtgcatgacagacgagaatgcaacgggccgttgtcacattcttacctctatgcacaataaatactcttagcagaagaactccgttccgccagtcccttatgcgatctcatttcctgtttatcgatcggtaatgagaatagcgcgtcaataaaaataagaaaatccttaaatgcaattgtttatctttttttacattttcagcggtgtgattttttcaggtgtaatgatttttggtatgtcattcttgtaactatttgaaagataaaagatattctattttttctgttttatgaaacattgtttcagatcatgggttaagccttttaagtatgttaatttcaataaaataaacattagtcagtctggatatcacacgcataaacggttgagagcaaatatgcctgtttttataaactagccgattttgcggtagatcatttttaatgtcattaatcatacgagcacgttattcggttaagcgcagttttgctgggtgactcgttaacaaggagcagtcaatgaaaaaggtcgcggtgctgttggcgccaggatttgaagaagcagaggccattgttactcttgatattctgcgacgtttgcatatcgacgtcgaaacgctggcgtgtgctgaatcacgggcggtggtgagttaccatgatattcctatggttgcggacagcacgctgagtgaacgccagcaggcgctttttgatgcggtagtgctgccgggcggtccgcaggggagcgctaatctggcggctaatccggcggtgatcgctttcgttgcgcgtcatgatgcggcaggcaaatttatttgtcctatctgttccgcggcggcaagggtgctgggtgctcacggattgctgaaggggcgtcgttatgtctgttccggcgacctgtggaaagcggttccggaaggtgtctatgtggatgcgcccgttgttgaagatggtaatttaattagcggcaaaggcttgggtcatgtctttgatttcgcgctaaccctttccgccagactgctgggagacgatgcgccggttcgcgaacaggctgaacatatctattatccctggtaatcgttattcacccagggccataaggattagctggctgatgttatggattaatgggctggctttcctgccttttggctgatgaattcgctctgggttatgtcattttccgctaaaactattcccgccatcagcatttatctaatgaatgaaagacagtgcaccgttttacgtcttctctaacaaaaatcgtttgattttaccctacataaaaaacgctaaagcaggtcaatgacttccctgggttatgagttaatcgttatttctgcgtgcgtattagggggcgttttcctgagaggcggcctcggaaaaatctcatatgtggtggcgagcgtactgatatcaggaacggtggagaacgcgatgaacctgctcaacatttcaccttttgcacagtacgtggttcgcggctgaatccttctggcagcagttatcttcgaccattataagcaaaaagcgaagcgtacgatttgatgaattaacactcaactaaacagtatagcttcacgtcatcgccagccgctaccccggctggcgatggtctttctaaatggcgagcagcgtcacactgtctatacttacatgactaatgagaccgtttgtgagtctcaatatgatgataaggaggagaccagggtggcagaaccgttaaccgtatcccccgaactcactgcgaactatgcgtatttttttgaccttgatggcacattggcagagataaagcctcatcccgatcaggtagtggtaccgcataaaatccttcagttgttagaccgtctcgcggcgcacaacgcaggggcactggcattgatttcagggcgttcaatgactgagctggatgctttggcgaagccttttcgctttccgctcgctggcgttcacggggcagagcgtcgtgacatcaatggtaaaacccatatcgtgcgccttcctgaagcggtagtccgtgaggtggaggcgttattacgttcgacgcttgtagcgctgcccggaacggagctggagacgaaggggatggcgtttgcgctgcactaccgtcaggctccggaacatgaagcggcgctgttggcacttgcgcaacacgttacgcagcactggccgcaactggcgttgcagcctggtaaatgtgttgtggaaatcaaacctaagggaaccaataaaggcgaagccattgctgcctttatgcaggaggcgccctttgcgggacggattcccgtttttgtgggcgacgatttgaccgatgaggctggctttggcgtggtgaatcacgctggcggaatttccgtaaaagtgggcgtcggggcaacccaggcggcatggcggctggaaagcgtacccgatgtctggcgctggctggaacaaatcaattatccacaacaagaacaacaagtaatgaataacaggagagatggctatgagtcgtttagtcgtagtatctaatcgaattgcccccccggataataaaggcggcgccggcggcctcgccgttggcgtgcttggcgcgctaaaagcggctggcgggttgtggttcggctggagtggcgagacaggtaacgaggatgagccattaaaaaaggtgacaaaaggtaatattacctgggcatcgtttaacctgagcgaacaagattacgaagattattactgtcaattttccaatgcggttctctggcctgcgttccactatcgtctggacctggtacagtttcagcgtcctgcatgggaaggctatatgcgggtgaatgcgctattagcggataagttattgcccctcattaaagagaacgacatcatttgggtgcatgactaccacctgttaccgtttgccagcgagctgcgtaaacgcggcgtgaacaaccgaattggttttttcctgcatattccattcccgaccccggagatttttaacgctttaccgccgcatgatgaactgctggagcagttgtgtgactttgatctgctagggttccagaccgaaaatgatcgcctggcttttctggatagcctttcgagtcaaacgcgagtcacgactcgcagcggcaagcagcatatcgcgtggggtaaagacttccagacagaagtgtatcctatcggtattgagcccgatgagattgctctgcaggctgccgggccgttgccgcctaaactggcgcagctcaaggcggaactgaaaaatgtgaagaatattttttccgtcgagcggctggattattcgaaagggctgccggaacgttttctggcgtatgaagcgctactggaaaactacccgcagcatcggggaaaaattcgttatacccaaattgcgcctacgtcacgcggcgaagtacaggcatatcaggatattcgccaccagcttgagacggaagcaggccggattaatgggaaatatggacaattgggctggacgccgctctattatctgaatcagcatttcgaccgtaaactgttaatgaagatattccgttattcagacgtcgggctcgtcaccccgttgcgtgacgggatgaacctggtggcgaaagagtttgtcgccgcgcaggaccccgctaatcctggcgtactggtactgtcacagtttgccggcgcggcgaatgaactgacgtcggcgttaatcgtcaatccttacgatcgggatgacgtggcggcggcgctcaatcgtgcgttaacgatgccccttgccgagcgtatttcgcgccatgcggaaatgctggacgtgatcgttaaaaatgacattaaccgctggcaggagcgttttattcatgacctaaaggaggtcacgccgcgtagccctgagcgccagcagcagaacaacgtggcgacgttccctaagctggcctgaaatatcgcgagcggcgactagtcgcccgctaacggtaccagcaacacatctacctggctggcgctgacgacactttttgccgagcaggatgcgcgcgaaaagaaactatggttatggttgccgcaaatgaccagatcaacatggtgtttgcggcacacagccaaaatatgctggcttaactcacctgatgcgatgaaagtttgttcaatcggataatccgccttttcccccagcatcttaagaaaattctcggtctcctcatgcataaccgcgcgtaaatcctccatcatgggcgcggcgaactggttatacagttcaggatcggaagcgagagtaatcaggcttactttcgcctggacagggcgggcgatagagacagctttagccagtagctggtgactttccggggtgacggcaacggcgacaagaatatgggtgtagctcataactcgctccttgattgcaagaatatgagatcgtgctttagctttactctgtttatcgcatttctgcaatgcgctaatgccacattaatgtgaaggacatcataattaatcattaattattcttatgtaaagaatcgtggcataagacactttttacacaccaccaggatgcttcatttaaatgggtgaacaatgaaagctaaaagttaaatcaaatgagcttatttttaacagcggagggcgtatgctgtgacgagattaattaataacgtttaatatttaagctactgtttactaaaggtaaaataaaagcgtttctaaaatagaaataatagcctgttatctattatcctggcgttattttaacagagagaaacaaaaaagaatttggtgttgacgtacccctattcagcagtgtggaatagaaaaagtgaacattaggttattaattaaacaaagtaaaagccatgctgatggttttatcgtaagtattccggtagattatgtgatctacatcacatattttctaaaatcgccgtcccgctccgttgtatgtcacgaagctgacgagtagagttgcgtcgaattaggaaaaatcttaggcgtttgtaaaaattgatgtaaacgtgtaaggcgaatctcagtgggaggctgcgttatacgtcacaatgtccataatgtctgagcgctgctatgcatttgacctttttgcttcttttaccgggccttcccggcgacatcacggggtgcggctacgtcgcacaaaaataaagttggttattctggatgggaacaatgcatacatccgagttgctaaaacacatttatgacatcaatttgtcatatttactccttgcacagcgtttgatcgtccaggacaaagcatctgcgatgttccgcctcggtatcaacgaagagatggcaaacacactgggcgcgttgaccctgccgcagatggtcaaactggcggagacgaaccagttagtttgtcatttccggtttgacgatcatcagacgatcacccgtttgactcaggattcgcgcgtcgatgatttacagcagattcacacaggtatcatgctttcaacgcgtttgctcaatgaagtggacgatacggcgcgtaagaaaagggcatgataatgagtgaaaaaagcattgttcaggaagctcgcgatatccagttggcgatggagttgattaatcttggcgctcgtctacaaatgctggaaagcgaaacacagctcagccgtggtcgcctcatcaggctgtacaaagaattacgcggtagcccgccgcctaaagggatgctgccattttcgacagactggtttatgacctgggagcaaaatattcatgcctccatgttctgcaacgcctggcaatttttactgaaaaccggcttatgcagcggtgtggatgcggtgattaaagcttatcggctttatcttgagcagtgtccgcaaccgcctgaagggccgttgttggcgctgactcgcgcatggacgttggtgcgttttgttgaaagtgggttgcttgaattgtcgagctgtaactgctgcggtgggaactttattacccatgcgcatcagcccgtaggcagctttgcgtgtagtttatgccagccgccatcccgcgcagtaaaaagacgtaaactttcccgagatgctgccgatattattccacaactgctggatgaacagatcgaacaggctgtttaaccgaaacggtgtggacaaacactccagcagcggtaagtcattaccgctgcttttttttgccttgccttcgcgttaatcgcccgactgcgcatcctgtcatagtcaacagcggaaggatgatgtcgtgcttatcttattaggttacctggtggttatcggtacagttttcggcggttatgtcatgaccggcggacaccttggggcactctatcaacctgctgaactggtcatcattggcggcgcggggataggggcgttcattgtcggcaacaacgggaaggccatcaaaggcacgatgaaagcgatcccgttgttatttcgtcgttcgaaatacacaaaatctatgtacatggatttgctggcgttgctctatcgcctgatggccaaatcacgtcagcaggggatgttctcccttgaacgcgatattgaaaatccgaaagagagtgaaatcttcgccagttatccgcgtattctggccgatgcggtaatgcttgattttattgtcgattatctgcgcctgatcatcagcggcaacatgaatacgttcgaaattgaagcgttgatggatgaagagattgaaacccatgaaagcgaggcggaagtcccggccaacagcctggcgatggtgggggattcgctgcctgcctttggtattgtcgcggcggtaatgggggtggttcacgctctggcttcagccgatcgtccggcagcggagttgggggcgctgattgcccatgccatggtaggtacgttcctcggtattttactggcttatggattcatttcaccgttagcgaccgttttgcgccagaagagcgccgaaaccaccaagatgatgcagtgcgtaaaaattacactgctgtctaatctgaacggctatgcgccgccgattgccgtggaatttggtcgtaaaacgctttattccagtgagcgtccatcgtttattgagttggaagaacacgttcgtgcagtaagaaacccaaaccagcagcagacgactgaggaagcatgaaaaatcaggctcatcccattgtcgtcgtaaaacgccgcaggcacaaaccgcacggcggcggggcgcacggttcctggaaaattgcctacgccgattttatgacggcgatgatggctttttttctggtgatgtggctgatttccatctccagccctaaagaattaattcagattgccgaatattttcgtacgccgttggccaccgcggtaacgggggggaatcggattgccaatagcgagagcccgataccaggcggcggcgatgattacacccaacagcagggtgaagtggaaaagcagccgaatatcgacgagctgaaaaaacggatggagcagagtcgcttaaacaaactgcgcggcgatctggatcaactgatcgaatccgatcccaaactgcgcgcgttacgtccgcatctgaaaattgatttagttcaggaggggttgcgcatccagattatcgacagccagaaccgcccgatgtttaaaaccggcagcgccgaagttgagccgtatatgcgcgatatcctgcgtgcgattgcgccagtgttaaacggtatacctaatcgcattagcctggccggccataccgatgactttccctacgcgaacggcgaaaaaggctatagcaactgggaattatccgccgatcgcgccaatgcctcgcgtcgcgaactggtcgctggggggctggataacgggaaagtattacgggtggttggcatggccgccacgatgcggctgagcgatcgcggtcctgatgacgccatcaaccgccgtataagcctgctggtgttaaacaaacaggcggaacaggccattttgcatgaaaacgctgaaagccagaatgagccggtaagtgtattacaacagcctgcggcagccccgccggcaagcgtacccacatcgccaaaagcggaaccgaggtgatagcgtgagcatggatattagcgatttttatcagacattttttgatgaagctgacgagctgttggctgatatggagcagcatctgctggatttggtgccggaatccccggacgctgaacaactgaacgccatttttcgcgcggcgcactccattaaaggcggcgcgggcacattcggcttcactattctgcaggaaaccacgcatttaatggaaaacctgctggatgaagcccgacgcggtgaaatgcagctcaataccgacattatcaacctgtttttggaaacgaaagatattatgcaggaacagctcgacgcctataaaaactccgaagagccggatgccgcaagcttcgaatatatctgcaatgcgctacgccagttggcgctggaggcgaaaggcgaaaccacgccggcggtcgtagaaaccgcggcactaagcgcggcgatccaggaagagagcgtagccgaaaccgaatcgcctcgtgacgagagtaaactgcgcattgtactttcacggttgaaagccagtgaggtcgatctgcttgaagaagagttgagtaatctggctactctgacggatgtcgttaagggggcagattcactgtcggcaactctggatggcagcgtcgcggaagatgacattgtcgcggtgctctgttttgtcatcgaggccgatcagatcgcttttgaaaaagtggtcgccgcgcccgtggaaaaagcgcaagagaaaaccgaggtagcgccggtagcgcctccggcagtcgttgcgccagccgccaaaagcgcggcccatgaacatcatgcggggcgtgaaaaacctgcgcgtgaacgcgagtccaccagcattcgcgtggcggtagagaaagtggatcagctcataaacctggtcggcgagttagtgattacccagtcaatgttggcccagcgttctaacgagctggacccggtaaaccacggcgatctcattaccagtatggggcagttacaacgtaacgcccgcgacttacaagagtcggtgatgtcgattcgtatgatgcctatggagtacgtcttcagccgtttcccgcgtctggtacgcgatttagcgggcaaactgggcaagcaggtagagctgacgctggtggggagctccactgaacttgataaaagcctgatcgaacgcattatcgacccgctgacgcacctggtgcgcaacagtctcgaccacgggattgaaatgccggaaaaacgccttgaggcggggaaaaatgttgtcggcaatctgattctttccgcagaacatcagggcgggaatatttgtattgaagtgaccgatgacggcgcggggcttaaccgtgagcgtatcctggcgaaggccatgtcgcaggggatggcggtgaatgaaaacatgaccgacgatgaagtaggcatgttgatcttcgcgccgggattctcaactgcggaacaggtcacggatgtctccggtcgcggcgttggcatggatgtggtgaaacgtaacattcaggagatgggcggtcacgttgagatccagtcaaaacaaggctccggcaccacgattcgtattctgctgccgctgacgctggccatcctcgatgggatgtcggttcgcgtggcgggggaagtttttatcctgccgttaaatgcggtgatggagtcgctgcaaccgcgtgaagaggatcttcatccgctggcgggcggcgaacgggttctggaagttcgcggcgagtatttgccgctggtcgaattgtggaaagtgtttgacgtggacggggcgaaaaccgaagccacgcagggcattgttgtgatcctgcaaagcgcgggacgccgttacgcgctgctggtcgatcagctcatcggtcagcaccaggtggtggtcaaaaatctggaaagcaattatcgcaaggtaccggggatttccgccgcgacgatcctgggcgacggcagcgtcgcgctgattgttgatgttaccgcattgcagggtttaaaccgcgaacaacgtatggcgatcacagccgcctgattgagtgagaagggaataatatgaccggtatgagtaatgtaagcaaactggccggcgagccgtcaggtcaggaattcctggtgtttacactgggaaatgaagagtacggcatcgatatcctgaaagtgcaggagatccgtggctatgaccaggtgacgcgcatcgccaatacaccggcctttataaaaggggtgactaacctgcgcggcgtgattgtccccattgtcgatctgcgcgtgaaattctgcgaaggcgacgttgagtatgatgacaatacggtagtgatcgtactgaatctggggcaacgtgtcgtcgggatagtggtagacggcgtgtctgacgtactgtcgttaacggcggaacagatccgtccggcgccagaatttgccgtgaccttgtcaacagaatatttgacgggattgggcgcgctcggcgagcgtatgctgattctggtgaatatcgaaaaactgcttaacagcgaagagatggcgctgctggatatcgcagcatcacacgtcgcgtaataacgttgccggatggcgtcgcgccatccggcaatattcaccgttatgcttccgccagcggtgagagttcctcttcatcgcccgcgcccagcccctgcattttgtgccgacatcgccgctgcgacgctgttattgtcaatatcgtcttccggaacaacgtatttcctttttgcaaaagtaaagttatcaccgcaggtgccgataacgttgataactcgttatcaggaaggtgccttatgtttaaccgtatccgcgttgtcacaatgctgatgatggtgctgggggttttcgcactgctacagcttgtttccggtggtttgctgttttcttcattgcagcataaccagcaaggttttgttatttctaacgaattacgccagcaacaaagcgaactcacgtcgacatgggacttaatgctgcaaacgcgcattaacctgagccgctccgccgcacgcatgatgatggacgcttctaaccagcagagcagcgccaaaacggatttactccagaatgcaaaaacgaccctcgcacaggcggcggcgcactacgccaatttcaaaaacatgacgccattgccagcgatggcggaggccagcgcgaacgtcgatgaaaaatatcagcgctatcaggccgcattagccgaacttattcagtttctggacaatggcaatatggatgcctacttcgcccagccaacccagggaatgcaaaacgcgttgggcgaggcgctgggcaattacgcccgggtgagcgaaaacctgtaccgccagacatttgatcaaagcgctcatgactaccgttttgcgcaatggcaactgggggggcttgcggtcgtgctggtgctgattttgatggtggtttggttcggcattcgtcatgccctgcttaacccattagcgcgagtgattactcatatccgtgaaattgccagcggcgatctgacgaaaacgctcaccgtctcaggacgtaatgaaattggcgaactggcgggaacggttgaacatatgcaacgctcgctgattgacaccgtgacgcaggttcgtgaaggttcggatgcgatttattccggcaccagtgaaattgccgccggtaataccgacctctcttcccgtaccgaacaacaagcctccgctctggaggagacggcggccagcatggaacaactgacggccaccgtgaagcaaaacgccgataacgcccgtcaggcttcgcaactggcgcaaagcgcctccgagaccgcgcgtcatggcggcaaagtggtcgacggcgtggtaaacaccatgcacgaaattgccgacagttcgaaaaaaatcgctgacattatcagcgttatcgacggtattgccttccagactaacattctggcgctgaacgcggcggtagaagcggcgcgcgcgggagagcaggggcgcggttttgcggtcgtggcaggcgaggtgcgtaatctggccagccgcagcgcccaggcggcgaaagaaataaaagcgttgattgaagattccgtctcgcgtgtcgataccggttctgtgctggtggaaagcgccggggaaaccatgactgacatcgtcaatgccgttacgcgcgtcacggatatcatgggcgaaatcgcctccgcctcggatgagcaaagccggggtatcgatcaggtcgctttggccgtttccgaaatggatcgcgtaacgcaacagaacgcctcgctggttcaggaatccgcagcggccgccgccgcgctggaagagcaggccagccgtctgacccaggcggtatctgctttccgcctggcatcgcgaccgctggtggcaaataaacctgagatgcgtttgtcagtggacgctcagtccggcaatacgccgcggtcagtagccgccggggatgatgcgaactgggaaaccttctgatcgacgtgcgctgtcggttctcgattaatttgcgaacccgccgatacatttcgtctggttcgcatagataaaagcaaaaaatgtgtaatacgggaagcatggcgctgccgcagggcgcgcccgttgtactttgaatgtgattaagaaggcgctatgacatcatctctgccctccgggcaaacgtcagtattgttacagatgacacagcgcctcgcgctgtccgacgcgcattttcgtcggatatgtcaattaatctaccagcgcgcagggatcgtgctggccgaccataagcgggatatggtttataaccgcctggtccgtcggctgcgtgccctgggactggatgattttggccgttatctcagtatgctggaggctaatcaaaacagcgctgagtggcaggcttttatcaacgctctgactaccaacctgaccgctttttttcgcgaggcgcaccattttcccatccttgcggaacatgcgcgtcgccgccacggcgagtaccgcgtctggagtgcggcggcatcgacaggagaagaaccttacagtatcgccattacgctggcggatgcgttagggatggcccccggtcgctggaaagtattcgccagcgatattgatactgaagtgctggaaaaagcgagaagcggtatttatcgcctcagcgaactgaaaacgttatcgccgcagcagctacaacgttacttcatgcgcggtacggggccgcatgaaggactggtgcgcgtgcgtcaggaactggccaattatgttgaattttcctccgttaatttattggaaaagcagtacaacgtacccggtccctttgacgcgattttttgccgtaacgtcatgatctattttgataaaacgactcaggaggacattctgcgccgttttgttccactccttaaacctgacggactgttgtttgccggtcactcagaaaactttagcaacctcgtgcgcgagtttagcctgcgcggacagacggtgtatgcgctaagtaaggataaagcatgagtaaaatcagggtattgtcagttgatgattccgcgctaatgcgccaaatcatgactgaaattattaatagccatagcgatatggagatggtggcgactgcgccggacccgttggtcgccagggatctcatcaaaaaatttaatccggacgtattgaccctggacgttgagatgccgcgtatggacggcctcgattttctggaaaaactgatgcgcctgcgaccgatgccggtggtgatggtctcttcgctgaccgggaaaggttctgaagtgacgctacgggcgctggagttgggggccatcgattttgtcaccaaaccgcagcttggcattcgtgaaggtatgctggcgtatagcgagatgatcgccgaaaaagtgcgtaccgccgcgcgggcccgcatcgccgcacataaaccgatggcggccccggcaaccttaaaagccggtccgctgctcagttccgaaaaactgattgctatcggcgcttcaacgggcggtactgaagctatccgacatgtgctgcaaccgctgccgctttccagtccggcagtgattattacgcagcatatgccgcctggctttacccgctcgtttgccgagcgtctgaataaactctgtcaaatcagcgtgaaggaggcggaggacggcgaacgcgtattgccaggtcatgcctacattgcgcccggcgacaagcatatggagctggcgcgtagcggggcgaattatcaaatcaaaattcatgatggcccgccggtaaaccggcatcggccttccgtggatgtgctgtttcattcggtggcgaaacacgcggggcgcaacgccgtaggcgtcattcttacggggatgggcaacgatggcgccgctggaatgttagcgatgtaccaggctggcgcctggaccattgcgcaaaacgaagcaagttgtgtggtgttcggcatgccgcgcgaggccatcaatatgggtggcgtaagcgaagtggtcgatcttagccaggtaagccagcagatgctggcgaaaatcagtgccggacaggcgatacgtatttgaaccaggagtagtattttatggcggataaagagcttaaatttttggttgtggatgacttttcgaccatgcgtcgtatcgtgcgcaacctcttaaaagagcttggatttaacaatgtggaagaggccgaagacggcgtcgatgcgctgaacaagctccaggcgggcggctttggttttattatctccgactggaacatgccgaacatggatggcctggagctgctgaaaaccattcgcgccgatagcgccatgtcggcgttacccgtgttgatggtcacggcggaagccaaaaaagagaatattatcgccgccgcacaggctggcgccagcggttatgtcgtaaaaccgttcaccgcagcgactctggaagagaagctcaacaaaatctttgagaaactgggcatgtgaggatgcgatgatgatgcaaccatctatcaagcctgctgatgaaggttcagcaggagacatcattgcgcgcatcggtagtctgacccgaatgctgcgcgacagcctgcgtgagctggggctggaccaggcgattgccgaagcggcggaggcgatccctgatgcgcgcgaccgtctggattacgtcgtccagatgacggcgcaggcggcggaacgcgcgctaaacagtgtcgaagcctcgcagccgcatcaggatgcgatggagaaagaggcgaaagcgctaacccaacgttgggacgagtggtttgacaatccgatcgagcttgccgacgcccgtgaactggtgacggatacgcgccagtttctcagggatgtcccgggccataccagctttactaacgcgcaactgctggacatcatgatggcgcaggatttccaggatctgacgggtcaggtgatcaaacgcatgatggacgtgattcaggagattgagcgccagttattaatggtactgctggaaaacatcccggaacagagcgcacgaccaaaacgcgagaacgaaagcttactcaacggcccgcaggtggatacctcgaaagctggcgtcgtcgccagtcaggatcaggtggacgacctgctggacagtcttgggttttaagcttttttgacctgatggcgctgcgcttatcgggttcgaatccgtcaacccggccggatacgagactttcttatcgtatccggctatctctattaacgccataaaccccgccttttttaccgcttactctgcccattggcgtaaagcggttctggcatcattctcgcttatcaatctatccagggtttgctgcgtggcagaagagagcgacgacgacaaaacagaagcccccacaccccaccgacttgaaaaagcgcgggaagaagggcagatcccccgttccagagaactgacctcactgctgatattgctggtgggcgtttgtattatttggttcggcggcgagtcgttagcgcggcaactggcgggaatgctctcagcaggcctgcacttcgatcaccgtatggtgaacgatcctaacctgatcctggggcagataattttgctgattaaagcggcgatgatggcactgctaccgctcatcgcgggcgtggtactggtggcgcttatctcgccggttatgcttggcggcctgatttttagcggtaagtcgctacagccaaaattttctaaattaaacccgctgccgggaattaagcgcatgttttcggcgcagaccggcgcggaactgctaaaagcggtgttgaaatccacgctggtcggctgcgttaccggcttttatctctggtatcactggccacaaatgatgcgcctgatggcggagtcgccgatcgtcgcaatggggaatgcgctggatctggttggactctgcgcgttactggtggtactgggcgtgattccgatggtgggatttgacgtgtttttccagatctttagccacctgaaaaaattacgcatgtcgcggcaggacattcgcgacgaatttaaagagagcgaaggcgatccgcatgttaagggcaaaattcgccagatgcaacgcgccgccgcgcagcgccgcatgatggaagatgtgccgaaagcggacgtcattgtcactaacccgacgcactattccgtggcgctgcagtatgacgaaaacaaaatgagcgcgccgaaagtggtcgcgaagggggctggattaatagcgctgcgcattcgcgagatcggcgctgaacatcgggttcccactttagaagcgccgccgctggcgcgggcattatatcgccacgccgaaatcggtcagcaaattcccgggcagttatatgctgccgttgcggaagtgttggcctgggtctggcagcttaaacgctggcggcttgcgggcgggcaacgtcctccacaacctgagaaccttccggtgccagaagcgctggattttatgaacgagaagaatactgatggctaatctggtcgcgatgctgcgcctacccagcaacctgaaatcgacgcaatggcaaattcttgccgggccgatcctcattctgctgattttgtcgatgatggtgctgccgctgcctgcttttatcctcgacttattgtttacctttaatattgcgctatcgatcatggtgctgctggtggcgatgtttacccagcgtactctggattttgccgcgtttccgaccatcctgctgtttaccacgctactgcgtctggcgcttaacgtagcctcaacgcgcattattttgatggaagggcataccggcgcggcggcggcgggaaaggtagtggaggcgttcggtcatttcctggtcggcggtaacttcgcgatcgggattgtggtttttatcatcctcgtcattatcaacttcatggtcatcaccaaaggcgccggacgtattgccgaagtcggcgcgcgctttgtgctggatggtatgcccggtaagcaaatggcgattgacgccgatcttaatgccggtctgattggtgaagacgaggccaaaaaacggcgttcggaagtcactcaggaagccgacttctacggctcgatggacggggcaagtaaatttgtacgcggcgacgccatcgccggtattctcatcatggtcattaacgtggtcggcgggctgctggtcggcgtattgcagcacggaatgagcataggcagcgcggcggaaagctacaccctgctgaccattggcgacggcctggtcgcccagatcccggcgctggttatctccacggcggcgggcgtcattgtgacccgcgttagtaccgatcaggatgttggcgagcagatggttggccaactgttcagtaatccaagggtgatgctgctggcggcggcggtgctggggctgcttggcatggtgcctggaatgcctaacatggtatttttactctttaccgccgctttgctcggcctggcatggtggctgcgcgggcgcgaagaaaaagcgccggaggagccgcagccggtaaaaatgccggaaaataactcggtggtcgaagctacctggaatgacgtacagcttgaggattcactgggaatggaagtgggctaccgcctgatcccgatggtggattttcaacaggatggcgaattgctcggacgtattcgcagcattcgtaaaaaattcgcgcaggatatggggttcctgccgccggttgtccacattcgcgacaatatggatttacagcctgcgcgctaccgtattttgatgaaaggggtagagatcggcagcggggacgcctatccgggacgctggctggctattaaccccggcacggcggcgggaacgctaccgggcgagaaaaccgtcgatccagcttttggccttgatgccatctggattgaaagcgccctgaaagagcaggcgcaaattcagggctttaccgtcgtggaagccagtaccgttgtggcgacgcaccttaaccacttgattggccaattctccgccgaactgtttggccgccaggaagcgcagcaactgttggatcgtgtctctcaggagatgcctaaactcacggaagatctggtccccggcgtcgtgaccctcacaactttacacaaagtcctgcaaaacttactggcggaaaaagtcccgattcgcgatatgcgcaccattctggaaacgctggcggaacatgcgccgttacaaagcgatccgcatgaattaaccgccgtggtacgcgtggcattaggacgagcgattacgcaacagtggttccccggtaatgaagaagtgcaggtgattggcctggataccgcgctggagcgtttgctgcttcaggcattgcagggcggcggcggtcttgagcctgggttggcggatcgcctgctggcgcagacgcaagaggcgctttctcgccaggaaatgcttggtgcgccgccggtattactggttaaccatgcgctacgtccattattgtcccgctttttgcggcgcagtttaccgcagctggtggtgttgtcgaaccttgagctttccgataaccgtcatatccgcatgacggcgaccattggaggaaaataatgcgtaaatggctggcgttgttgctctttcccctgacggttcaggccgcaggcgaaggcgcgtggcaggatagcggtatgggtgtaaccttaaattaccggggtgtttccgcatcgtcttcgccattgtcggcgcgccagccggtttccggtgtgatgacgctggtcgcctggcgttatgaactgaatggcccgactcccgcgggcttacgggtacgtttatgttcccagtcccgttgcgtagaacttgatggtcagagtggcacgacccacggttttgctcatgttcccgcagtcgagccgctccgctttgtctgggaagtccccggcggcggccgacttatcccggcgttaaaagtgcggagcaatcaggtgattgtgaactaccgctaaccgcccctttctttgccaggtagcagacctgactctctttttgaataaatagaaacgctgttttataaaatggtgaggtaggttgccggactctttgcgtttttgccatttacgctctggcaatggcagaaacaaaaaggtttccgcccagcttagcttttactgtagcgaatcgactgcgtcggcggtaaaactgcacgcagcactgaattcgacattacacagaggttaagcaaatgatggtttatccagtcaaacacagtccgctattgcgtcagcctgagcattttatcgccagagatgaactaaaagccctggtgcaaaaggtgacgcataacctggtcaatattaaagatgagacaggcgaatttttattgcgactggacgatggacgcgtgatcgatactaaaggctgggccggatgggagtggacgcacggcgtgggcctgtacggaatgtatcactattaccaacagaccggcgaccagacgatgcgtaagatcattgatgactggtttgccgatcgttttgcggaaggcgcgacgacgaaaaacgttaatacgatggcgccatttttaacgctggcgtatcgctatgaagagacgcgtaatccagcgtatttaccgtggctggaaacgtgggccgaatgggcgatgaatgaaatgccccgtaccgatcacggcggaatgcagcacatcacgctggcggaggaaaatcatcagcagatgtgggacgacacgctaatgatgacggtgctgccgctggcgaaaatcggtaaactgttgaaccggccggaatatgtggaagaggcaacctatcagttcctgctgcacgtgcagaatttgatggataaagagacggggctgtggttccacggctggagctatgacggtcatcataacttcgctaacgctcgctgggcgcgcggcaacagttggctgaccattgtgatcccggattttcttgaactgctggacttgccggaaaataatgccgtgcgccgttacctggtccaggtactgaatgcgcagatcgccgcgctggcgaaatgtcaggatgaaagtggtttgtggcatacgctgcttgacgatccgcactcttatcttgaggcgtcggcgacggcgggttttgcctacggtattcttaaagcggtgcgcaaacgctatgtcgggcggcactatgcgcaggtggcggaaaaagccattcgggggatagtgaaacatatctcgccggaaggcgaactgctgcaaacgtcatttggcactggcatgggccacgatctcgatttttaccgtcatattccgttgacctctatgccttacgggcaggcgatggcaatgctgtgtttgacggaatatctgcgtaactatttctgatgtatgcagatattccggccgtatccttgtctgatggcgctttgcttatttgactatggcgcctgacccgactgtgtggtatcagcctgtggatcaaacaggtggtcaaggatttttcgcatgatgggcgcggcggtaacgccgtcgcttccgccgttttccagaatcaaggcaatagcgaccttagggtttttatacggtgcaaaagcggtataaaacacatgatcgcgcaggcgaatggggatcattttcgcgttgtaggtctgattttctttcaggctaaacacctgcgacgtgccgcttttggccgcaatgccgtagggcgctgtgtgaaagaacttatagcccgttccgttgggtgcattcgccatgccatacatcgcctgacgcaccagtccccagtatggcgacgccggatcggctatctgtgccggtgttcctgaagggcgatacggaaccaccgttttgccgctctcttcattgagtaacaggtgaggggcaatcaccttaccgttgttgatgagcgccaccatcgcttttaccatctggatgggggtggcaatccagtaaccctggccgatgccgacagaaatggtatcgccctgataccaggcttttttatggacccgctgtttccatgcgcggctgggaagcagcccgtcatactcttcattaaggtcgatgcccgtcggtttgccatagccgaactgagacaacatcgtgtcgatacggtcaatacccatcatataagcgacctgatagaaaaaggtatccgcagattcctcaatcgctttagtgacatccagcataccgtgtccggtttttttccagtcccggtaatgccgctgcgtgccgggaagcgtccaggttggcgcgccaaagaaggtggtttgcggcgtaataatcccgcataacagcgcggacattgccatatagggtttaaccgttgacgccggaggataaagcccttgcgtcacgcggttgatcagcggcagatttttatcgtgcagcagtttgccgtaatcctgatagctaatgccttttacaaaggggttcgggtcgtagctgggcatagataccatcgccagcactgaaccatcgtgcggatcttcaaccagtacggcagcacgctgcccggccagcaaactttcaatgtactcttgtaaatggagatccagcgtcaggtgaatgttcttacccgcgatgggaggaacgtctttcagcaggcggacaatacgcccgtgattatccacctcgacctcctgataaccggttttgccatgaagatcgttttcgtagtaacgctcaatcccctgtttaccgatgttatggtccgccgcgtaattctctgccagcccttttttatccagcgctttaaggtcgttatcgtttatctttgacacgtaaccgagaacatgcgccagctccgcgccgtaaggatactgccgatcctgatagctattgatcgtgacgccgttgaaatgaaactgattgaccgcaaagcgtgcgatttcaacatccgttagcgcgtttttgagcaccaccggacgatagcggctactggattttagcgcgcggcgaaagtcggcgatatcatcgggggagagatcaacaataggggtgagctgttttagcagcgcatccatatcggcaattttatagggcgtaaccgcgatatcataccaggttacgttacgcaccagcggaatgccgttgcgatcgtaaatgatgccgcgcgtgggcgcgacgggtagcatcttgatatcgttctcattcgaacgggtggtgtagtagtggtgctgacggatttgcaagttatagaggttgaagatcaggataccaaagcagacaaccactacaccaaacgccacaatcacacgtctcaggaagagtttctcttccgcatcaaagtctttaaaagtcattacctgtacctgaacaatccgccgcctaatgatacggggcggtcagcgccagcacaggtaaaagatgttccatctctctatagaaatgtgtcattccttgtgatttgttacagatataccgctgtggcaataaaaaggcctgagtccgttatccggagtcaggcctgatgatgttaacgacggcgcgtttacatgcgttctacggtttcgatacccaacgtatccagacccagtttcagcgtcttcgccgtcagttgcgccagttttaggcggctattgcgaaccgcgtcattctcggcgctgagaatagggcagtgctcgtagaagccggagaacagcccggcgacgtcatacagatacgcgcacatgacgtgcggcgtaccttcacgcgcgaccaccgtcagggtttcttcaaactgcagcagacgggcagcgagttgcgcttcgcgatcttcgctaatgataaccggcgcgctcgccagcgcctgctcgtcgatgtccgctttacggaaaacagacagcacacgcgtataggcatactgcatataaggagcggtattgccttcgaaagccaacatattatcccagtcgaagatatagtcagtggtgcggttttttgacagatcggcgtatttcaccgcgccaataccgacggcgttagccagtttttccagctcgtcagccgacatatccgggttcttctccgccaccagacgacgcgcgcgctccagcgcctcatccagcaggtccgccagtttcaccgtaccgcccgcgcgagttttaaacggtttaccgtctttacccaacatcatgccgaacatgtggtgttccagcggaacggaatccggcacataaccggctttacgcacaatggtccaggcctgcatcaggtgctggtgctgacgggagtcaatgtagtagagcacgcggtcggcgtgcagcgtttcgtaacggtatttggcgcaggcgatatcggtagtggtatacagataaccgccatctttcttctgaataatgacgcccatcgggtcgccttccttgtttttaaactcatcaaggaaaaccaccgttgcgccttcgctttcaaccgccaggcctttggctttcagatcggcgacgatgcccggcagcatcggattatacagactttcgcccatcacatcgtcacgcgtcagagtgacgttcagacgatcataggtgatctggttttgcgtcatcgtgatatcaaccagcttacgccacatctcacggaaataggtatcaccgctctgcaatttgacgacgtagttacgcgcgcgctcggcaaacgcttcatcttcgtcataatgctttttcgcatcgcggtagaatccttcgagatccgccagcgccatgtcgcccgcgttttcctgctgctgtttttccagccaggcgataagcataccgaactgggtgccccagtcgccgacgtggttagcgcgaataacatgatggcccagaaactccagcgtgcgcactgccgcatcgccgataatcgtggagcgtagatgaccgacgtgcatctctttcgcgacgttgggcgcggagtagtcgacgacaatcgtctgacgagtcggctgagaaacgcccagacgatcggaggtcagcgcctgttgcacctgttcagcgagaaaagccggttcgaggaaaatattgataaagccagggccggcgatttcaaccttgctggcgatgccgctgagatccagatgagtcagcacctgctctgcaagttgtcggggggccatacccagttttttcgcaactgccatcatgccgttggcctgatagtcgccgaactgaactttggctgactgacgaacctggggctcgcaatctgcaggcgcgcctgcagcaatcatggcctgactaactttttctgagagaagagcctgaatattcaccggaataccttacgtttatgaagcggactgtattgcccgcgccagtttaagaattagggcgggagtatactgcaaatgcccgttggcgtcagcattgcgcgcgcggcgcgtcgcctgaaatatacgcaacaataatctgcataagcattcaataaacgcccaatcaaatcaaaggttggttgccggggcgcaacagcgtaaattagcggttttcacagcaagaagagcgtcctgatatggcgaactggcaacacattgatgaactgcatgatatttccgcagatttaccgcgattcactctggcgttcagagaactttccactcgccttggtctgcagattagcgcccttgaggccgatcacatttcattgcgctgtcaccagaatacgacggcggagcgttggcgtcgcggttttgaacaatgcggtgagctactgtcggaaaatatcatcaacggcaggccgatttgtctgtttaaactgcatgaaccggtatgtgtggaacactggcggttttctgttatcgaattaccgtggccgggagaaaaacgctatccacacgaggggtgggagcatattgaaatcgtgctgcccggcgagccggagaccttgaacgcgagggcgctggcgttgttgtcggatgaggggcttagtcagccggggatagtggttaaaaccagttcgccacagggcgagcatgaacgtttgccaaaccctacgctggccgtgaccgatggccgcatcacggtaaaatttcatccatggtcgattgaagcgattgtcgccagcgaacaggcggcccattaacctgccgagcggagtgaatatggcgttacttgagatctgttgttacagcatggaatgcgcgctcaccgcgcagcgaaacggcgcggatcgtatcgaactgtgcgccgcgccgaaagaaggcgggcttacgccttcgctgggcgtcttacgcagcgtgcgcgagcatattacgattcccgtacatccgattattcgtcctcgcggcggggatttttactacactgacggcgaatttgccgccatgctggaagatattcgcctcgtcagagagttgggttttcccgggctggtgactggcgtgttgaccgttgatggggatgtcgatatgtcgcgaatggaaaaaataatggcggcggccggaccgctggcggtgacattccaccgcgccttcgatatgtgtgctaatcccttcaatgcgctaaagaatctggctgacgcaggcgtagcaagagtactgacttccggacaaaaagccgatgcggcgcaaggtttatcaataattatggaacttattgcccagggggatgctccaaccattatggctggtgcgggggttcgtgcaaataacctgcagaatttcctcgatgccggagtacgggaagtacacagttccgccggagtcttactgccttcgccgatgcgctatcgcaatcaggggttatcgatgtctgccgatatacaggcggacgagtattctcgctatagggtagagggtgcggcggtcgctgaaatgaaaggaatcattgttcgccatcaggccaaatgatttttaccgttgcatcatgtcgcccaatatgatgcttgctcgtaccaggcccctgccaattcaacaggggcctttttttctccttcatatttcaagccgcagcagcgttggccgcctcgcgcaccccggtcacgtagctacctacgttcccggggatttgctgcgttgccgccttgctgcaacttgaactattttggagaaacggtgctatacgtaacggtcattcggcaatccatcacggtttacgcgcaatcagcaccgcgcgctgcggggcggggtagccttccaccgtcttgctgcgatcgttcgggtcaagaaaatcggccagcgactcggtaaccatccattcggtacggcgctgctcttcggtggtggtgacgcaaacgtcagcgatacgcacatcaataaagccgcatttttccagccatttttttaatgccggcgcggaaggaataaaatagacgttacgcatctgcgcgtagcggtcacccggcaccagtacggtattttcgtcgccgtcgacgaccagcgtttccagtaccagttcaccctcgttgaccaactgatcttttaactgccacagatgctccagcggcgagcgacggtgataaagcacccccatcgagaagacggtatcaaatgctttcagcgccgggagttgttcaatgcccaacggcagcagatgcgcgcgctgatcgttacccaacagtttacgcaccgcctcaaactggcagaggaaaagctgtgtaggatcgatgccgaccgccagatgtgcgcccgcgccaatcatccgccacaggtgatagccgctgccgcagccgacatcaaggatcgtccggccggttaaatctgacagatgcggcagtacgcgatcccacttccagtcggagcgccattcggtatcaatatctacgccataaagcgagaacgggcctttacgccacggcatcagattacgcagcaatgtatcaatacgctttagctgaccttcgctgagcggcgtttcgctttcagccgtgacgctgtgcagtaaatccagccgccagggcgtcatttccggtaaaaattctaccgcgttcgaccactgtttaaacaagccatgctgctgctcgcgttgccaggcggcaatctgcgcgggcaatgtttccagccagtgggagagatgatttttagcaatgagctgataaaagttaccaaactcgatcatgcggcaactccggcttttaacgcgacaagcgacccgaagttaaagcactggaaccacagttcactatgttcgaaacccgccttacgcaggcgcgctttatgtgtttccaccgagtcggtgagcatcacgttttccagcatactgcgcttctggctgatctccagttcgctgtacccattcgcgcgtttaaaatcgtggtgcatgttgaataacagctcacccactttcgcgtcttcaaagctaaatttttccgacagtaccagcgcgccgccgggattcaaccccaggtaaatcttatccagcaatgcctggcgttcggcaggttcaaggaattgcagggtaaaattcagcaccaccatcgaggcgttttcaatagtgatatcgcggatatcgccttcaacgacttcaaccggcgtaggcgctttatacgcatcaatatggcggcggcagcgttcaatcatggccggggagttatcgacggcgataatgcgacaatgctcatggcggatattacgccgaacagacagcgtcgcggcgcccagcgagcagcccagatcgtagacctgcgtgttcggctgcacaaagcgttcagctaacatgccgatcatggagatgatgttggagtagcctggtaccgaacgctgaatcatgtcggggaaaacttcggctactcgttcatcaaaagtccagtcgccgagacgggcgataggcgcagaaaaaagcgtgtcgcggtgagacataacgtatacatccgggaaaaataaaggcgcatattgtgcgctaatacagggagaaaaccaactcccagggcatataccacaggtttgccagcaccatcagcaacaatgcgcaccaggtagcgctcatccccgcccgccgccagcggaacaggcggtggtgaaaaccgtaataatgcatcagccgaccggcgattaaaatgatgccgcagatatgcaccatccacgtttcggcgccgttcatttccataaacagcagcagcaccagcgcgacaggaatatattccaccgcgttgccatgaatacggatggcgctttgtaattcgctaaaaccgccgtcgccataggcgacacggtactgcattcgcaagcgaacgacattaaaagagaacttcattaataataacgcacccaaaacggcatacagcgcgcttaccatacaaactcccttttaaaatggctgatggcactgtctatgatagggggcattttcagaaaagagaagattgctgtggaatggacggagcagtgccgatttccggtaagacgctgcgtaaatcatgccaaagtgtattcaccagttccggcgcctgcgcgatatccggagtatgtaaaaacagaaaaggcgtggtggtctgccgccactgcgggagtttctgcaaccaggcggcgaaaaactcacggttttgcgccatattatcgctaccgataaaacgcaccatcggatggctagccgtcacgacagcatgtaccggaactttgggtttttttcgctgcgcgtcgcggacggcctcgctgtggggatgggcggcatgtaccggacgactatccaggatcacgcggtttacgccgcgcgcgtgtaacccgcgattgagccgctgttcatcctcacctttgtcaaaaaaacacggatgacgaacttctacgccataggtaaacgtggcggggagcgcatcaagaaactgccataaggcggggagatcgcgcggtccaaaggcggcgggcaactgcagccagtattggccaatacgcgtttccagcggcgccaggcgggtaaaaaacgcctgtaccagatcgtcgcaatggcgcagcgcggcctggtgagaaatggtcgcgggaaatttaaagcaaaaacggaaatcgtccgtagtttgcgcataccagcgatcgacaatttccgctttcggcagcgcgtaaagcgtggtgttgccctccacgcagttaaagtggcgggcatactcttccagactggtgatgccgagccgcgcccatttcgggtgcgaccattgcggcaagccaatgtagatcataaggcgtttaaaatatcctctacgctgcgtacccggccaatgcgcgggaaaatatgcgtcatactgctctgatgctgctcactgctggcggcgctacaggcatcttcggcaataataaggttaaatcccaactcccaggcgttacgcgctgtggattcgacgccgatattggttgagatcccgcacaatatgatggtgtcgataccccggcggcgaagctgtaattccagatcggtgccgtaaaacgcgccccactggcgtttagtcacttccagatcgctgtcctttttacccaatgccgtaggccaggtccaccagttttccggcaacgcgtgcgcaggcgttgcggcatccacgggttgttttaacgcttcggcataatcatcagaccatccgacgcgtaccataaccacgggcgagccgttggcacgacacttttccgccagccgcgcggcgcgggcgaccacctcatttgccgtatacgggccgccggcaaacggaagaattccttcctgtaaatcaataaccaccagggcggttgtggtcgcgttgagtttcagcatgataatcactctcctaaaaatagcgtatttcactacaccttaagcgcgattaaagaggaaagcggtgacaaatattgttaatttttgtgagcatacgcaatacccgcgtgaaaaacccgggtacagtcagtatgaaccaagtgtcgataccgcatgaaacgggcaagttatcgctcccatgctggattgactcttatcgtgcggcagaatttccagtataatagccgccttttttcatccagttgtgacatacagctaaagctgcgacttcgtcgcctgcatggcaggcaacaatccgcctgcggctaagttaagggatatctcatgcgtacagaatattgcggacagctacgtctgtcccacgtggggcagcaggtgactctgtgtggttgggtcaaccgtcgtcgtgatcttggcagcctgatctttatcgatatgcgcgaccgcgaaggtattgtgcaggtgttcttcgatccggatcgtgcggacgcgttaaagctggcctctgaactgcgtaatgagttctgcattcaagttacgggcaccgtgcgtgcgcgtgacgcgaaaaacgtcaatgcggatatggcgaccggcgaaattgaagtgctggcgtcctctctcactatcatcaaccgcgcagactcactgccgcttgacgctaaccacgttaataccgaagaggcgcgtctcaagtaccgctatctggatttgcgtcgtccggaaatggcgcagcgcctgaaaactcgcgccaaaattaccagcctggtgcgtcgttttatggacgatcacggtttccttgatattgaaacgccgatgctgaccaaagccacgccggaaggcgcgcgcgactatctggtgccttcgcgcgtgcacaaaggtaaattctacgcgctgccgcagtcgccgcagctgttcaaacagctcctgatgatgtccggtttcgaccgttactatcagatagtcaaatgcttccgtgatgaagacttacgtgctgaccgtcagccggagtttactcagatcgacgtcgagacctccttcatgaccgcgccacaggtgcgcgaagtgatggaagcgctggtgcgccatttatggctggaagtgaaaggcgtggatctgggggatttcccggtcatgacgtttgccgaagcggaacgtcgttacggttccgacaaaccagacctgcgtaacccgatggaactggtagatgtcgctgacctgctgaaatcggtagagttcgcggtcttcgcgggcccggctaacgatccgaaaggccgcgtggcagcgctgcgtgtgcctggcggggcgcagcttagccgtaagcagatcgacgattacggtaactttgttaagatctacggcgcgaaaggcctggcgtatatcaaagttaacgagcgcgcgaaaggtctggacgggattaacagtccggtggccaagttcctgaccgccgacatcgtcgacgctatccttgaacgtaccggcgcgcaggacggcgacatgatcttcttcggcgcagataacaaaaaagtggttgccgatgcgctgggcgcgctgcgtctgaaactgggcaaagacctgagcctgaccgacgaagacaaatgggcgccgctgtgggtgattgacttcccgatgtttgaagacgacggcgaaggcggtctgaccgcgatgcaccatccgttcaccgccccgcgtgacatgacggcgtctgaactgaaaactgcgccggaagaagccgtcgctaacgcttacgatatggtgattaacggctatgaagtgggcggcggttcggtgcgtattcacaacggtgaaatgcagcaaaccgtatttggtattctcggtatcaatgagcaggagcagcgcgagaagttcggcttcctgttggatgcgttgaaatacggtacgccgccgcatgcgggcctggcgtttggtctggaccgtctgaccatgctgttgaccggcaccgacaatattcgtgatgttatcgccttcccgaaaacgaccgccgccgcgtgtctgatgaccgaagcgccgagtttcgccaaccaggcagcgttgacggagttggggattcaggttgtgaagaaagccgagaataactgatatgaacaatgtacacgacatcattcgcgtgatatcgcggcggcccgcaagggcgagtctcatcaatgcacggcgtcactcaacagccaacaacgaggtcgcgtgaaggataaagtgtacaagcgccccgtttcggtcctggtggttattttcgcgcaggatacgaaacgggtgctaatgttgcagcgacgcgacgacccggatttttggcagtcagtgactggcagcatagaagaaggggagaccgcgttgcaggccgccgtgcgtgaagtcaaagaggaggtcacgattgatgttgcggcagagcaactgaccttaatcgactgccaacgtacggtggagtttgaaattttttcacatttacgtcatcgctatgcgccgggcgttatgcacaatacagaattctggttctgccttgcgttaccgcatgagcggcaggtgatattcactgaacatctgacgtaccagtggcttgatgcgcctgacgcggcggcgcttaccaagtcctggagtaaccggcaagcgattgaagagtttgtcattaacgtcgcctgaaaaggcgcgctttttttgaggaaatatttatggcaggtcatagtaaatgggccaacaccagacatcgtaaagctgcgcaggatgccaagcgcggtaaaatcttcactaaaattattcgtgaactggtaacggcagctaaattgggcggcggcgatccggatgccaacccgcgtctgcgcgcggccgtagataaagcgctggccaacaacatgacccgcgacactctgaaccgtgccatcgctcgcggtgtgggtggtgatgaagactcgaacatggaaaccatcatctatgaaggttatggtcctggcggcacggccattatgattgagtgtctgagtgacaaccgtaaccgtaccgtagcggaagtgcgtcatgctttcagcaagtgcggcggtaatctgggtaccgatggctcagtggcgtacctgttcagtaagaaaggggtcatctcctttgagaaaggcgatgaagacaccatcatggaagccgctctggaagctggcgcggaagatgttgtgacctatgatgatggcgcgattgatgtttacactgcctgggaagagatgggcaaagtgcgtgacgcgctggaagcggcgggtctgaaagcggacagcgccgaagtgtccatgatcccgtcaaccaaagcggatatggatgcggaaaccgcgccgaaactgctacgtctgatcgatatgctggaagactgtgacgatgtccaggaagtctaccataacggtgagatctctgatgaggtggcggcgaccctgtaatggtgctgttaaacgccggcgggcaggggggatagcgtgtcgattattctcggtattgaccccggctcgcgcattaccggttatggcgttatccgccaggtaggcagacaactgacctatctgggcagcggatgtattcgcaccaaagtcgatgatttgccgtctcgtttgaagctcatatacgcaggcgtgacggaaatcatcacgcagttccagccggactattttgctatcgaacaggtgtttatggcgaagaacgccgattcagccctcaagctgggacaggcgcgcggcgtcgcgattgtcgccgcggtcaatcaggaactgcccgtgtttgaatacgcggcgcgtcaggtgaagcaaaccgtcgtcggtattggtagcgcggaaaaaagccaggtacagcatatggtgcgcacgttgctcaaactgcccgctaacccgcaggcagacgccgcagatgcgctggctatcgccattacgcattgccatgttagccagaacgcgatgcaaatgagcgagagccgactcaatctggcgcggggaaggttgcgctaaatcattctccctcagcctcgcgttgaggggtttcaattccacaggcgctaattaattctaaattgggatgatgccacaggctggcgggcgtcaccgtcttacgatcccacgggattgaacctaaaaaccagaatttccagaaggtgagtttcgcatcaggattgctgtgaagtaattcttcgaatgtctcaatatcgcctaccggaatacacaatgcttctttatagatatcaaacacaaatttcgagcagaactggcgcgatgactcgtatttaaaccccgtgtgataaaacttattcagccgggcgggaacctgctccatgatggcgagtttctgctcgaccgtcaggccgccgcgcagacggcgaacggcgtaacgttgtccggctgaacgttgtataaacagtgacagcgtggtgacggttgagagggggacgcgactttccgccaccagatagtcatcaccattatgaccaataataatcccaacatggttgctccagcactgtgaagcggtggatatctggccgaaaagcgcggcacctatacaggtaaagacggtatccccggtttcatattggacagaataatgttttttcatctctgcattccattatttgaaataaattccttttatttattctacagggtagttagcattataccagataaatgacaagccttagtgtcatcgaaatatgtatggtgaatatttcatttattggaattaatgtcgcaaatatatttgggggggattaaggtggtaaatttctcatcatctgatctctcatattgacagggagtatgacgtggttgatgataaaccaatgagaataggttgggtattttatttttcttatatttttgttgctattatctttcatctgtttattagtttttgttattgtttgagtattgatatggcagaggctaatactgttgtttttttattaaagccagggacgatttcattattatttttgcttctccctgccaggcggttcaggaccagactgttggcaacattgagttcagttttcattaccttagtatttaaccagtggcatttggttgccgggaataaagaactggttttgtgcctgcaggcagcgtgctttatggctttcctggctatgacatcggtaaaaaaatccgggtggatgattagcgcatcattatttttggtttgtgcggccggaacgattcgccagtgctggctggaacagctgtttaacgctgccgatatatatattgttgatgatgggcggagcagtggcgccagcggccactgcttccagtatattgcagcaaaaggccgtgggttagcagcaaaacgacaggcactttttagtagcgaagagtatgtgaatatttattatagttattcagaagggatgccagccgtgaatttcgatggcatgaaaaatgagtttgtacaatatttattgtgtcatggcgaattaaaatctgttgcgcgcgacgataaaacaacatgcgattaaattcagcgctagtggttaatattattaaatctattctcgggtctgtttttttggaggcccgatgttccgctgttggcattcgtactggatacattattagtgttatcaggatactcattattgaagactaccgaacgtgcgccacggcatgttggcaaaaagttgttcgcgtaggacgcaaaaagttgtcaatgagtgtacgacttattttgtacgcagcggggagcgtacccgtcgttaaccatcgcgggttgtcggagtagagaaatatcgggatacgtgtttttcatctggataaacatccagtctttttttatgatagtgcattatcttttcagccctttacgcaggagcgtcatgtgataggcagactcagaggcattattctcgaaaaacaacccccgatcgtgctgctggagacagggggagtaggctatgaagtacatatgcctatgacctgcttttacgagctgccggaggccgggcaggaggcaatcgtcttcacccacttcgtggtgcgtgaagatgcgcagttgctgtacggatttaacaataagcaagagcgcacgctatttaaagagctaattaaaacgaatggcgtcgggcctaagctggcgctggcgatcctctccggcatgtcggcgcaacagttcgtcaatgcggttgagcgcgaagagctgggtgcgctggtgaagctgccgggtatcggcaagaaaaccgccgaaaggctgattgtcgaaatgaaagaccgctttaaagggctacatggcgatctctttacgccagcggtcgatctggtattgacgtcgccggccagcccaacctcggaagatgcagaacaagaagcagttgctgcgctggtggcgctgggttataaaccgcaagaagccagtcggatggtaagcaagatcgcccgtccggatgcaagcagtgaaacactgattcgcgacgcgttacgcgccgcgttatgaggtaaaggatgatagaagcagatcgcctgatttcagcaggcgccacgatcgcagaagacgtcgccgatcgcgccattcgcccgaagttattggcggaatatgtcggccaaccgcaggtgcgctcccagatggagatctttattcaggcggcaaaacggcgtggcgacgcattagatcacttgctgattttcggcccgccagggttaggtaagacgactctggcgaatatcgttgccaatgaaatgggcgtcaatctccgaaccacgtccggcccggtgctggaaaaagcaggcgatctggcggctatgctcaccaatcttgaaccgcatgatgtgctgtttattgatgagattcaccggctttcaccggtggtggaagaggtactctatccggcgatggaagattaccagttggatattatgattggcgaagggcctgccgcacgttcaattaagatcgatctgccgccgtttacgctcattggcgcgacgacgcgcgccgggtcgttaacgtccccgctacgtgaccgttttggtattgtgcagcgcctggagttttaccaggtgcctgatctgcagcacatcgtcgggcgcagcgcaaggcacatggggcttgagatgagcgatgacggcgcgctggaagtggcgcgtcgggcgcgcggtacgccgcgtatagccaaccgtctgctcagacgtgtgcgtgatttcgccgaggtgaagcatgacggggctatttcagcggaaattgccgcgcaggcgctggatatgctgaacgtcgatgcggaagggtttgattatatggatcgcaagctactgctggcggttattgataaattcttcggtggtccggtgggactggataacctggcggcggcgattggcgaagagcgtgaaaccattgaggatgtgctggagccgtatctgattcagcaaggctttttgcagcgcacgccgcgtgggcgtatggcaacggtgcgcgcctggaaccatttcgggatcacgccgccagagatgccttagcgcctgaagtcgctgcgctcatcagacctgggcgattttgtaggcccggtaagcgcagcgccaccgggcaacacacgcttagcttgcctgctttttcatcatactgaagataaacagcagcgcggcacacagcactacggatggccctgccggggtatcataaaaggctgagaaggtcagtccacctgtaaccgctatcatacctacaccaacggcgacgcccgccatctgctccggcgtacgggcaaagcgacgcgcggttgcggcggggataatcagcagcgacgtaatgatcagcgctccgacaaacttcatcgccacgccaatagttaacgccgttaccagcatcaatagcagcttcacgcgctgtaacttcacgccatcgacaaaggcaagatccggactgatagtcattgacagcaagttgcgccactgccagaagagaatggccagcacaataacgaccccaatagcgatcgagataagatcttccggcgtgacggccagcaaatcgccaaacagataagccattaaatcaacgcggacgttggacatcaggctgaccacgaccagtcctaaagataaggcgctgtgcgccataatgcccagtaaggtatcaatcgcgaggtgagggcgtttctccagccataccagaccggcggccagcagcagcgtaacggcgattaccgcataaaaggggttaacgtccagcaacaggccaaacgccacgcccagaagcgacgcgtgagccagcgtatcgccaaaataggacatccgacgccagaccacaaatgagcccaatggaccagcggcgcaggccagcatcatcccggccagccagccgggcagtaataattcaatcatgagtgaccatttccccggcgcagtacaatacggccctgtaaatcgtggcgatgattatgatgatggcgataaatccctaattgctccgcgcctcgcgggccaaacatagagataaattccggatgcatagacaccacttccggcgcgccggaacagcaaatatgatggttcaggcataacacttcatccgtctttgccatgaccagatgtagatcatgcgacaccatcagcacggcgcaatcgagttcacggcgcagctgatcgataaggtcgtataacgcgacctggccgttgacatccacgccttgcgtcggctcatcaagtaccagcaactgaggcctgttaagcagagcacgcgccagcagtacacgctgtgtctcaccgccagagagtttttgcatgggcgcgtcaatcaaatgtccggcctgaacgcgtttaagcgccgggagaatatccgttttttgtgtgccgggacgtaaacgtaaaaatcggtttaccgtcagcggaagcgtggtatcgagatagagcttttgcgggacatagccgatacggagttgcccgttgcgcttgatcaccccttcatcaggggctaccagtcctaaaaccacgcgtacaagcgttgacttccccgcgccgttagggccgagaagcgttaaaatttttccggggctcaattcaagcgacacgtcagagaggacgcggcgttgaccaaatgagaccgagacgttttccagtgaaactaaacttgtcatgttaattttaggcttgcagaagtgatagaatgttataatatcacatttcacacattcattacgatgattagtcgcattatgttacagaaaaatacgcttcttttcgcagcattatccgccgcgctttgggggagtgcaacccaggctgccgacgccgccgttgtcgcttcgcttaaaccgcttgggtttatcgcttccgccattgctgatggcgttacggatacacaagtattacttccggatggggcttccgagcatgattattcattgcgtccatcagacgtaaaacgcttacagggcgcggacttagtcgtctgggttggcccggaaatggaagcctttatggagaagtcggtcaggaatattcctgataataagcaggttaccattgcgcaacttgccgatgtaaaaccgttactcatgaagggcgcggatgatgatgaggatgaacatgcgcatacgggcgccgatgaggaaaaaggtgacgtacatcaccatcacggcgaatataacatgcatctttggctctccccagagatagcgcgggctacagcggttgcaatccatgaaaaattagtggaacttatgccgcaaagtcgagccaaactcgacgccaacctgaaggattttgaggcacaattagccgcaaccgataaacaggtcggtaacgagctcgcgccgctcaaggggaaagggtatttcgtttttcatgacgcctacggttactacgaaaaacactacggactcaccccgctcggtcactttaccgtgaaccctgagatacaacctggcgcgcagcgtttacatgaaataagaacacagttggttgagcaaaaagcaacctgcgtttttgctgagccacaattcaggccagcggtcgtggaagccgtggcgagagggacatccgttcgaatgggaacactggaccccctcgggacgaacattaaactgggtaaaacaagctattcagcgtttttaagccaattagccaaccagtatgcgagctgcctgaaaggagattaacgaggaagtgaatacgtgcaacagatagcccgctctgtcgccctggcatttaataatctgccccgaccccaccgcgttatgctggggtcacttaccgttctgacactggccgtcgccgtatggcggccctatgtttaccacccagaatccgcaccaatcgttaaaactattgaactggagaaaagcgagattcgttccctcttaccggaggccagcgaacccatcgatcaggccgcgcaggaagatgaagctattcctcaggatgagctggacgataaaaccgcaggcgaagtcggcgtccatgaatacgtcgtctccacaggcgatacgttaagcagcattctgaatcagtacggcatcgatatgagcgatattagccgacttgccgcttctgataaggagctgcgcaatctgaaaattggccaacagctttcctggacactgactgccgatggcgatttacagcgtctgacatgggaagtctcccgccgtgaaacgcgtacctacgatcgcactgccaacggttttaaaatgagcagtgaaatgcagcagggggactgggttaacagtctgctgaaaggcacggtaggggggagctttgtcgccagcgcgaaagaggcaggtttaaccagcagcgaaatcagcgcagtgataaaagccatgcagtggcagatggattttcgcaagctgaaaaagggcgatgaattttcggttctgatgtcgcgcgagatgctggatggcaagcgtgaacagagtcagttgttgggcgtgcggatgcgttccgatggtaaagattactacgccattcgcgccgctgacggtaaattctatgaccgtaacggtgttggcctggcgaaaggctttttacgcttcccgaccgccaaacagttccgcatctcctccaatttcaatccgcgccgtctgaacccggttactggacgcgttgcgccgcatcgtggcgttgactttgcgatgccgcagggtacgccggtgctgtcggtgggggatggcgaggtcgtggtcgctaaacgtagcggcgctgccggttactacattgcgattcgtcatggacgcacctacaccacacgttatatgcacttgcgtaagctgctggtgaaaccggggcaaaaagtgaaacgtggcgatcgtattgcgctttctggtaacaccgggcgctccacagggccgcatctgcattatgaggtatggatcaaccagcaagccgttaaccctctaacagcaaaattgccgcgcacggaaggtctgacggggtcagatcgtcgtgaatacctggcacaggtgaaagaggttctgccacaactgcgcttcgattaacaaatgcgctgacagagccggtacgcgatgtgtgccggcttttttgttttgtgtgcggcgcagacgtcgctacactattcacaattccttttcgcgtcagcagaccctggaaaagcatggaaaccaaaaaaaataatagtgagtatatccctgaattcgaaaaatcctttcgctatccgcagtattggggcgcctggttgggcgcggcggcaatggcggggattgcattaacaccggcatcattccgtgaccctttgctggcgacgctggggcgctttgccggacggctggggaagagttctcgtcgccgggcgctaattaatctgtctttgtgctttccgcagcgtagcgaagctgagcgcgaagcgattgtcgatgagatgttcgccaccgcgccacaggcaatggcgatgatggctgagttggcgatgcgcggtccgaaaaaaattcaacagcgtgttgactgggaaggtctggaaatcattgaggagatgcgtcgtaacgacgaaaaagtcatttttctcgtaccgcatggctggggcgtcgacattccagctatgctgatggcctctcaggggcaaaaaatggcggcgatgtttcataatcagggtaatccggtttttgactatatctggaacaccgtgcgtcggcgttttggcggacgtttgcatgcgcgcaatgacgggattaaaccctttattcagtctgttcgtcagggctactggggttactacctgccggaccaggatcatggcccggagcatagtgaattcgttgatttctttgcgacatacaaagcgacgctgcccgcgattggtcggctgatgaaagtgtgccgcgcacgcgtgataccgcttttcccggtgtataatggtaaaacgcatcgcctgactatccagattcgcccgccaatggacgatctgctcacggctgacgaccacactatcgccagacggatgaacgaagaggtcgaaatttttgtcggcccgcatccggaacagtacacctggatcctgaagctgctcaaaacccgcaagccaggcgagattcagccgtataagcgtaaagatctttatcccatcaaataaataaagcctctcgtaagagaggctttatgctgacaaaccctgtactacctgatgaacaggcgtgggggagttttactccacggtcaagatacgcgtggtattggttgaaccgacggtgctcatgacatcgccctgggtcacgataaccaggtcgccggaaaccagataccctttatcgcgcagcagattaacagcttcatgtgccgcgacaacgccatcagccgcgctgtcaaaatgcaccggcgttactccgcggtagagcgcggtcaggttcagcgtgcgttcatggcgcgacatggcgaaaatcggcaggccggagctgatacgggaagtcattagcgcggtacgaccggattccgtcatggtgatgatcgcggtaacgcctttcagatggtttgccgcatacatcgcagacatggcaatagcttcttcaacgttgtcgaactgcacgtcgagacggtgtttagacacattgatgctggggattttttctgcgcccaggcagacgcgcgccattgcggcaacggtttcagaaggatactgaccggctgcggtttcggcagacagcataactgcatccgtgccatccaggacggcgttcgccacgtccatcacttccgcgcgggtcggcatcgggttggtgatcatcgactccatcatctgcgttgcggtgatgactgcacggtttagctgacgcgcacggcgaatcagcgccttctggataccaaccagctccggatcgccgatttcaacgcccaggtcgccacgtgcgaccatcacaacgtcagaggccagaatgatatcgtccatggcgttttggtcgcataccgcttcggcgcgttcgactttagccacaattttcgcgtcgcagccggcgtcgcgtgccaggcggcgtgcgtagttcagatcttcgccgcagcgcgggaaggagacggccagatagtcaacgcctatcagcgcagcggtttgaatatcggctttgtctttttcggtcagcgcttcagcagaaagcccgccgccgagcttgttaatgcctttattgttagacagcgggccgccgacggtgacctcggtaaagactttcatgccctggacttcaagcactttcaactgcactcgaccatcgtcaagcagcaggatatcgccaggaacgacgtctgccggcaaccctttgtaatcaatgccgactttttctttgtcgccttcgcctttacccaggttagcgtctaacagaaatttgtccccgatgttgaggaacactttgccttctttaaaagtggaaacgcgaatttttggcccttgcaggtcgcctaaaatagccacatgacgccccagtttggcggcaatctcacggactttatcagcacgcattttatgatcttccggcgagccgtgagagaagttcatacgtactacgtttgcgcccgcggcgataaccttctcaaggttgttatcgcggtcagttgccgggcctaacgtggtaacgattttggttctgcgaagccttctggacatgtaatactccgttgactaaaacaacttggtgttgcgtgaacattgatccggtcgttctgaaaccttaacggtataaaatgaacgtccccggatgacgaaaagggtagaacattgttattgcttttagcggtcatcactcttgatgagtaattctttatcaaaacgcgattccttgagcgcttccttgacacgcttcaagttatctctgaattttgccccgcgacgcaaagtaaatcccgttgccagcacatctatcacggtcagctgagcaagtcgagagaccatgggcatataaatgtctgtatcttccggtacgtcgagggtaatggccagcgtggcttcgcgcgccagcggcgttccagcggaggtcagggcgatcaccatcgcatcgttttcccgcgccaactgcgccagttccaccaggctcttggttctgccagtatgcgaaatgagcacgacgacgtcatcatcgctacaattcatacagctcatccgttgcagcacgatatcgtcggagtaaatcaccggcacattgaagcgaaaaaacttattcatggcgtcatgcgcgaccgcggcggaggaaccaagaccaaaaaaggcgattttttttgcctgggtcagtaaatcgaccgcgcggttgacggccgatttatccagcgactggcgaacatggtcgagactggccatagcggactcgaagatttttcctgtataggcctcgacgctgtcatcttcatccacattgcgattaacatagggggtgccatttgccagactttgcgccagatgcagtttaaaatcaggaaagccgcgggtattcatgctgcgacagaaacggttcaccgttggctcgctaacgttagcttcctgggccagcatggcaatgcttaagtgaatcgatctgcctggggcggccagaataacatcggcgacttttcgttcagatttgcttaaatgttccagttgagactggactttttccagcatattcatgattagcaaggctcatgggtattagcgatttcaatgatgcgcgaaaccgagcgcgttttgttagatattactcctggcggctgtcaaagggggcaaaatggctaaaaaaggtgtcgttttttttcattacatgaccgacgtcggattttaagttccagcttgtgtggaaaagcgacaattttattaggcgttttgccgattatattgccaatcaaacgccggttcacccatgaaaaggcgtttacggtttccgtaatctcgtaaaagcagtacagtgctgtgtaataaaattacaacgatatcctggctaaagtaccaggagattaactgaggagaatgacatggcggtaacgcaaacagcccaggcatgtgacctggtcattttcggcgcgaaaggcgacctggcgcgccggaaactgctgccttccctgtatcagcttgagaaagccggccagatccatccggatacccgtatcattggggtggggcgcgcggactgggataaagaagcttatacccacgtcgtgcgtgaggcgctggaaaccttcatgaaggaaaaaattgatgaaggcttgtgggatacgctgagcggccgtctggatttttgtaatcttgacgttaacgatacgcctgcgtttagtcgcctgggcgatatgctggatcaaaaaaaccgcaccaccattaactattttgcgatgccgcccagcacctttggcgctatttgcaaagggttaggagaggctaaactcaacgccaaaccggcgcgcgtcgtgatggaaaaaccgttgggtacttcgctggcgacctcgcgtgagattaacgatcgggtcggcgaatactttgaagagtgccaggtgtatcgtatcgaccactatctgggcaaagaaacggttctcaacctgctggcgctgcgttttgccaactcgttattcgttaataactgggataaccgcactatcgatcacgttgagattaccgtagcggaagaggtggggattgaagggcgctggggatattttgaccaggccggtcagatgcgcgatatgatccagaaccacttgctgcaaattctctgcatgattgccatgtcaccgccgtctgacctgagcgccgacagtattcgcgatgaaaaagtcaaagtgttgaaatcgttgcgccgtattgatcgctccaacgtgcgtgaaaaaacggttcgtggtcaatacaccgcgggctttgcgcagggtcaaaaggtgccgggctatctggaagaagagggcgcgaataaaagcagcaacaccgaaactttcgtcgcgatccgcgtcgacatcgataactggcgttgggcgggcgtgccattctatctgcgcaccggcaagcgtctgccaaccaagtgctctgaagtcgtggtttatttcaagacgcctgaactgaatctctttaaagagtcctggcaagacctgccgcagaacaaattgacgattcgcctgcagccggatgaaggcgtagatattcaggtgcttaacaaagtaccggggctggatcataagcataatctgcagatcacgaagcttgatctgagctactccgagacctttaatcagacgcacctggcggatgcatatgagcgcctgctgctggaaacgatgcgtggcattcaggcgctgtttgtccgccgtgacgaagtggaagaagcctggaagtgggtggactccattaccgaagcatgggcgatggacaacgacgcgccgaagccgtatcaggcgggcacctggggaccggtagcgtccgtggcgatgattacccgtgacggtcgttcgtggaatgagtttgagtaaatttgccactcactcttaggtggtattttaccggtaacatgatctaacacagattgtagaatcatttttgcacttttaagcctcgtgtggattcacctgcgaggctttttttattacactgcctgaaacgattttgccccattatccccggacatcatgtatttcactgtctttccacattgatgaaacgcatggtaaacccggtagccggacagataaatttcaggagcctctatgaatcctaatttgttacgcgtaacacagcgtattgtcgaacgctcgcagcagacccgagaagcctatcttgcccgcattgagcaggcgaaaaccgccacggtccaccgatctcaactggcctgcggcaacctggcgcatggcttcgccgcctgtcagccagaggacaaagcctcgctgaaaagtatgttgcgcaataatatcgccattattacctcctacaatgacatgctctctgcgcatcaaccgtatgaacattatccgcagattattcgtcaggccctgcattccgtgaatgcggtaggtcaggtcgcaggcggcgtaccggcaatgtgcgatggcgttacgcaagggcaggatggcatggagttgtcattactcagccgcgaagtgatagcgatgtcggcagcagtaggcctctctcacaatatgtttgacggcgcgttattcctcggcgtatgcgacaaaatcgttccggggctggcgatggccgcgctctcttttggtcatttacccgcgatttttgttccgtcaggcccgatggcgagcggcctgccgaataaagaaaaagtccgtattcgtcagctatatgcggaaggaaaagtagacagaatggcgctgctggagtcggaagccgcctcttaccatgcgccgggcacctgtacattttacggcaccgccaacaccaaccagatggtggtggagtttatgggaatgcagttgccgggttcttcgtttgtgcatccggatgcgccgctgcgcgaggcattgactgccgctgccgcacgtcaggtaacacgtcttaccggcaacggcaatacgtggatgccgctcggtaaaatgatcgacgaaaaagtcgtggtgaacggcattgtcgcgctgctggctaccggcggctccaccaaccacaccatgcatctggttgcaatggcgcgcgcggcgggcattctgatcaactgggatgacttctcggatttgtcggaagtggttccgttgatggcgcgtctgtacccgaacggtccggcggacattaaccacttccaggcggcgggcggcgtaccggtattgatgcgtgagctgctcaatgccggattgctgcacgaagacgttaacactgtcgcaggcttcggcctgaaacgctatacgctggagccctggctcaacaacggcgagctggactggcgtgaaggcgcggaaaggtcactggataacgatgtcattgcctcttttgataagccgttctctcctcacggcggcactaaggtgctaagcggtaatctggggcgcgcagtaatgaagacgtctgcggtaccggttgaaaaccagatcattgaagcgcctgccatggtatttgaaagtcagcatgatgtgctgcctgcgtttgacgcgggtctgcttgatcgggattgtgtcgttgtcgtgcgtcatcagggaccaaaagcgaatggaatgccagaattacataaactcatgccgccacttggtgtattattggaccgccgtttcaaaatcgcgttagttactgatggacgactttcaggcgcttcgggtaaagtgccttcagctatccacgtaacgccggaagcctacgatggcggcttactggcaaaagtgcgcgatggcgacatcattcgcgtgaatgggcagacaggtgagttaactctgctggtcgacgaggcggaacttgccgctcgtcagcctcatattccggacctgagcgcgtcgcgcgtcggaacggggcgtgagttgtttggcgcgctgcgcgaaaagctgtcgggtgcggagcagggcgcaacctgtatcactttttaagatgacacactagtaatcaggcgagagaagaattccgatgaaaaactggaaaacaagtgcagaagcaatcctgaccaccggcccggttgtcccggtcattgtagtcaataaactggagcacgcggtgccgatggctaaagcgctggtggccgggggcgttcgcgttctggaagtgactttacgtacggcctgcgcgatggatgctattcgcgctatcgctaaagacgtgccggaagcgattgtcggcgccggaaccgttctcaatccgcagcagttggcggaggtgacggaagcgggcgcgcagtttgcgattagcccgggactgactgagccactgctgaaagccgcgacggcaggcactatcccattgattcccggtattagcaccgtttctgaactgatgttgggcatggactatggtctgaaagagttcaaattcttcccggcggaagcgaatggcggcactaaagcgttgcaggcgattgccggtccgttctctcaggtacgtttctgcccaaccggcggcatctctccggcaaactatcgtgactatctggcgctgaaaagcgtgttgtgcatcggcggttcctggctggtgccggccgacgcgctggaagcgggtgattacgatcgcatcaccaaactggcgcgcgaagcggtagaaggcgcgaaacagtaagccgttaaatgcccgatggcgcttgcttatcgggcttacgagtggcgatcaggcaggtctgataaaaatgcgctaacgtcgccatcaggcgatggcgcattagccttttaccgtcacgcggctggcggcctttttcgctcttatcaccgcttcttcaacgttttcacctgtcgctaacgctacaccaagacgacggctgccgtcgatctcaggcttaccaaacagccgtacctgcactccggcccctaccgccgtgtgtacattatcaaacgtcacattttgactggtaagctgcggcagaatcacggccgaggcagcgggaccatactggcgaatagcgcctatgggcattcccagaaaggcgcgcacatgcagcgcaaactcagaaagatcctgagaaatcaacgtcaccattccggtatcgtgcgggcgaggggagacttcgctgaaaatgacttcatcgccacagacgaagagttcaacgccgaacaggccatgcccgcctaacgccagtaccacatgacgcgcaatctcttgcgcccgcttcagcgccagttcgctcatctgctgtggctgccaggattcgcgatagtcgccatcttgctgacgatgaccgactggcgcgcagaaatgcacgccatcgacggcgctaacggtgagcagcgtaatttcaaaatcaaatttaaccacgccttccacaatcacgcgacccgcgccagcgcgtccgccctgttgagcatactcccatgcctgcgcgagctgttcggccgagcggataaagctctggcctttgccggaagagctcatgaccggtttgacgatgcaaggaaaacccactgcggctaccgcatcatgaaaactggcctcactgtcggcaaagcgatacgtcgatgtcggcagacctaattcttctgcggccaggcgacggatcccttcgcggttcatcgtgagctgcgttgcacgggcgcaaggcacgacattcagcccttcgtcctccagctcacgcagcgtatcggtggcgatcgcttctatttccggcacgatataatgcggtttttcctctgtaatcacatgacgtagcgcctcgccgtccagcatattaatgacgtgtgaacggtgagccacatgcatggcgggagcatcaggatagcgatcgacggcgataacctcgatccccaggcgttggcattcaatcgccacttcttttcccaattcacctgcccctaataacatcacccgcgttgctgccggacgcagcgcagtgcctaatagcgtcatatttctgtccccttatttacctgcgcgcagtatatacgaaaacgtttgcgtatgtcttttcgaatagattgcttttcttgctgtcttgcaatatactgtatataaacacaggtaaataaggggctgcaaaatggcggttgaagttaaatacgtagtcattcgcgagggtgaggagaagatgtcatttaccagtaaaaaggaagccgacgcctgggacaaaatgctcgatactgccgatcttcttgatacctggcttgagcagtcgccagtcgtgctggaagatgggcagcgcgaagcgttgtcgctgtggctggcggaacataaagaggtgttaagcactatcctcaaaaccggtaagttgccttctccgcaggcggttgaaaaggacgccgcgagtaaaacgaaaaagcaagccgcctgaacccgtacttgcgctcccggcgttttgtaccatgcttttcctgaatcattgtgctaaggagaaaagtatgaataaaagaggagcgttgttgagcctgctgctgttatccgccagcgtatcggcatttgcggcatccaccgagagtaaatcggttaagtttccgcagtgtgaagggctggatgccgccgggattgcggcaagcgtgaagcgcgactaccagcaaaatcgtatcgtgcggtgggccgacgaccaaaaaaaggtcgggcaggctgacccggtcgcgtgggttaatgtgcaggacgttgtaggtcaaaatgataaatggacagttccgctaactgttcgcggtaaaagtgccgatattcattatcaggtcatcgttgattgcaaagccggcaaggcggaatataagccccgctagcagcgtaatttgcgcttcttttgccggaacagacaattcctgacatcccctcaggtacgcttgaccattattggtctgtatttgaggggtactatggctaactggttgaaccaattacaatcacttcttgggcaaaaaggcgcttccgcatcgtcttccggtgaacaggggttaaataaactgctggttcccggcgcgctgggcggtctggctggactgttggtcgccaataagtcttcgcgcaaattattaactaaatacggtactggcgctttgctggtgggcggcggcgcggtggcgggttccgtattgtggaataagtacaaagataaagtacgcgctgcgcatcagggggagccgcaattcggcagccaaagtacgccgctggatgttcgcactgagcgactgatcctggcgctggtttttgctgcaaaaagcgatgggcatattgatgccaaagaacgcgcggcgattgagcaccaactgcgagaatcaggtgtggaagagcaagggcgtgtgtttatcgagaaagctattgagcagccgcttgatccacaacgtctggcacagggcgttcgtaatgaagaagaagccctggaaatctacttcctgagctgcgccgccattgatattgaccactttatggaacgtagctatctgaatgcgttaggagacgcactaaaaattcctcaggaggttcgggacggtatcgagcaggacttgcagcagcaaaaacaggcgctaccaggctgataacctgccattaagtaacatgtttcgcttgcatcatgcgtgtcttttgccacccttataggatggatagtttacgtcattcatgttgcaagatagcggcgaagcagtgacatctcaggcgcttaccgaggtgagcgaccgggactaccatgctacgccgctgtgtttgccgcgtgatatataacaaatattaacgcaaaagaaaaaacgacatgttgccaaaagccaatcgaattccctatgccatgaccgtacatggcgatacgcgcattgataattattactggctgcgagatgacactcgctcgcagccggaagtccttgattacctgcatcaggaaaatgagtatggccggaaggtcatgtcctctcagcaggcgttacaggaccgcattctaaaagaaattatcgatcgcatcccgcccagagaagtttccgctccgtatgtgaaaaatggctatcgctaccgttatatctatgaacccggctgcgaatatgccatctatcaacgacaatcggcgttaagcgaagagtgggatgtgtgggaaaccttgctcgatgcgaaccagcgggccgcgcacagcgaattttatacgctcggcgggcttgccattacgccggataataccatcatggcgctggcagaagattatttatcccgtcgtcagtatgggttgcgttttcgtaacctcgaaagcggtaactggtatccggaactgctggataacgttgcgcctgagtttgtctgggccaatgattccctgaccctttactatgtgcgtaagcataagaagacgctgctgccctatcaggtttggcggcacacgattggcactccgtcatcgcaagatgaactggtatatgaagaaaaagacgataccttttatgtcagcctgcataaaaccacttcgcagcattatgtggtgattcatcttgccagcgccaccactagcgaagtgctattacttgacgcggaactggccgatgccgagccgttttcattcttaccgcgtcgcaaagaccatgaatatagtctcgatcactatcaacataagttttacctgcgttctaaccggaacggtaaaaactttgggttgtaccgtacccgcgtgcgcaatgaaaacgcctgggaagagctgatccctccgcgcgagcatattatgctggaagggtttaccctgtttaccgactggttagtggtcgaagagcgtcaacgggggcttaccagcctgcggcaaattaaccgtaaaacccgtgaagtgataggcatcgcctttgacgatccggcttacgtgacgtggcttgcctataatcccgaacctgagacctcccggctgcgttacggctattcttcaatgacgacgccagataccttgtttgaactggatatggataccggagaacgacgggtacttaaacagacggaagtgcctgggtttgattctggctgttatcagagcgaacacctgtggatcaccgcgcgcgacggcgtcgaagtgccggtatcgctggtttatcatcagaagtattttcgtaaagggcaaaatccgcttctggtttacggctacggatcttacggttccagtattgacgccgacttcagcagcagccgactgagcttgctggatcgtggctttgtttacgcaatcgtacacgttcgcggcggcggtgagctggggcagcagtggtatgaagatggcaaattcctcaaaaagcggaatacttttaatgactatcttgatgcctgcgatgccttattaaaactgggttacggttcgccgtcgctgtgttacgggatgggcgggagcgcgggcggaatgctaatgggcgtcgctatcaacgaacgccccgagcttttccacggcgttattgcccaggtaccctttgttgatgtattaaccacgatgctggatgagtcgatcccactaacgacaggagagtttgaagagtgggggaacccgcaggatattgagtattatgactatatgaaaagctatagtccttatgacaatgtcaaagcgcaggactatccgcacctgctggtgacgacaggattgcacgattcccaggtgcaatactgggaaccggcgaagtgggtggcaaaattacgcgagctaaaaacggaccaacgtctgctgctgctatgtacggatatggactccgggcacggtggtaagtcggggcggtttaaatcctacgaaggcgtcgcgctggagttcgcctttttaatcggcctggcgcagggaaccttacatagcgcatagacgcgcgcgcccgcaacggcttgtgagcgtcgcgggttattgtggtgttccattgctgcgttgctcgccagcctgaacatcttccaggtagtgtttaagcgtcaggcgaagttccgggctcatattatcaaggttattaaaaagccagcgtaaatagcccggatcgcgttttgcgacttcagataccgccttaccgcggtatttaccgaacgggaaagtggttaacagcgcaggacggcccgtgatattgaccatttcttccgcggtccagccggtggttcgcataatatcaatcagcaaggcggcggtgatatagcaatcataaagcgcccggtgatgatgcagccccggtggcgtttgtacgcttagtttgcgcgatttatagagcgacatattgctgtattttattcccggccacaggcgtcgcgacaacttcatggtacagatccactcacccggcaattcaggtaatacgcgtctgtcgaaactggcattgtgagcgacataccactcactaccgtaataaagcggtatgacatcttcaatccacggcttatcggcgaccatggcttcggtaatacggtgtatcgccatcgcctgcggcgtaatagggcgatcggggcgtatcaggtgactcatgggattgacaatgttgccatcaatgacatcaacagaggctatctctacgatcccgccctgcagcccgcaggtttccgtgtctataatccgcaacatgattcattcctcaccgaaagaccttagcgtaatggaatgatatcgccttgccaaccctccgttgtgcgcaggcccgtcagtaatagcgaaccgcaatcggcacgaacaataagttgcccgctttcatcccacagcgcgctacttccacaggcattggccatcagtacggccagcgcatatttatgcgaaaaacgttgtaagcgtgaggtagaagcatggagttcaggttcgttaagacattgactggttgtgaataacgtaaatgagggatctatatcaccaccttctggctgctcatccaccacgttgatagcgcttcgctgcctggcaatacaggcgccatgacttttgtgaaacatgagcggcgacgttagccatggggcaaaaatagcgatgccttttacgaagcggcagttatgctcaacaggcatacccacaatgatagtcatatggtgggtatcggccgcatgagtgagcggctgtaaaagcgcctcgtcaggcggggcgggcaacgatttattcctttcgtcgcagcctaatagcgacagtgacggaaagaccagcagttcgcactgttgacgagccgcaagctcaatatattccagatgatgggcgacatgctccgccggcgaggcgttcaggggcgcatactgcgcagcagcaattttccaggaggacataatgacttccttttcatagtctctacagccattctaaaaagcataggttaagaatcaccttataatgtagtcgtctgcatgtaaggaagtgtaacgttatataatttttatttaactttgggttcgtaagggagtcgggatagtgatacggaagccagacgatgggcaatcagccgctcgcgaaaccaggcgcgtaggtgctctggctgctcacgttcgaccgcctccgcgacaactggcatattgtagcgctctttaaatgccaccccggctgccgccaggtccacattgactttatccatttccgcttgttcaagctgagccagattcgttttcatacgcgtctccttttttgttgccgccagaaggtactaagagtccgcggtaatggcaagatggaaatgatgatcctcgactcattgattgttgaaggttattctttgtaacgtaggtataacaaaaaggaatagtgaatatggcttcttctgcaccatcgcgacgtttagctttactgctgctggcatcgacatttgcgacgccagcggcctgggcacatgcgcacctgacgcatcagtatccagcggcgaatgctgccgttacggcctcgccacaggcgctgaccctgaacttttctgaagggattgagccagggttcagcggcgcaaccattactggccctcagcaagagctcatcaaaacgcgcccggcaaagcgaaatgaacaggataaaacgcagttgattatcccgcttgagcagccgttaaaatctggcgcttacacggtagactggcacgttgtgtcggtggatggacataaaacaaaagggaaatacaccttcagcgtgaaataaatgatgctgacattcgtctggataactctccgatttattcattttgctagtttgatgctggtctacggctgcgcgctttacggcgcctggctggcacccgcatcaattcgtcgtttaatgacgcgtcgatttttacatctgcaacgacatgccgccgcctggagcgttatcagcgcggcttttatgctggcgattcagggcggactgatgggcggcggctggcccgatgttttttccgtctcggtgtggggcgcggtactgcaaacccgctttggcgcggtctggatatggcaaattatcctcgcgctggtcacgctggcggtggtagtcattgcgccggtaaaaatgcaacgacggcttcttattctcaccgttgctcagtttatcctgctggcaggcgttggacatgcgacgatgcgcgacggtgtagtgggaacattacagcagattaaccatgctctgcatttactctgtgccgcagcctggtttggtgggctgttgccagtggtttattgtatgcgcatggctcagggacgctggcgtcaacatgctattagcgccatgatgcgtttttctcgttatggtcacttttttgtggcgggcgtattgctcacaggcattggcaacacgctatttatcacgggatttaccgctatctggcagaccacctatggacagttgcttttgttaaaatgtgcgctggtcgtgcttatggtagcaattgcgctgacgaatcggtatgttctcgtaccacgtatgcgacaggaaaatccccggactgacctatggtttgtcaggatgacgcaaattgaatggggagttggaggcatagttctggcgatcgtcagcctgtttgcaaccctcgaacctttttgatggactggcataacgaatgaaaaaaatactccttccggcgcttctgctggccacttcgggcgtagcgttggcggcgccgcaggtgattaccgtaagtcgttttgaagtaggaaaagacaagtgggcgtttaatcgggaagaggtcatgttgacctgtcggcctggccaggcgctctatgtgatcaaccccagtacgctggtgcagtatcccttgaatgccattgccgaacagcaagtagcggagggtaaaacgcgtgctcagcctattgccgtcattcgaatcgataacccggcgaagcccggtgagaaaatgagtctggcgccgtttatcgaacgtgcgcaaaagctttgtgatccatccaatagctgactgatttttaataaaaaaccgtaaaccttcacgaaaaggcttacggtttttttatctctgataacagacaaaacgccaggttttttcaatcaccttcgtcgcaaactggaaaacctggcgtcgtcatctattcttaaagggcaaggcgatttagcctgcattaatgccaacttttagcgcacggctctctcccaagagccatttccctggaccgaatacaggaatcgtattcggtctctttttatttttcttataaaacagttacttatgatcaatgatccgaaattttccgaaatttttccgaatttctgtattccggtctttttggttatatcacaatcaaattaaatttaacatttatttcacaacgaaaattggagtattagagcatcatataagctttatcatcacgctcatcgagatagagtttcgtggtgttcgctgatgtgtggcccaggagtttttgggcgaacacctcgccgtgctcgtttttgtacagccgcccggccagacttcggatctcgtgaaatgtcggtggattattgctgaagttaacaccggaggcttttcttgcttttacaaatgtctttgtcaatccatccggatgaatattcccggttgggctatttttcctgattccggcactgatcatgaaatcagtgcggcttaccagtcggcagcgatcgattaccgttcccagacgtaaccccgtcgcccgaagtgtcagggagaggggaatggctattttcattccggttttaatctgagttacgtataagcggttgtcaaaaacatcactaaatttcatatttacgatatcctccctacgttgaccagtaacgagcgctaaatccatcgcgagagggaaccatgcaggcatatgctctgctgccgctcgtgtggcgttatacgtttccagttgcaggcgttccctggccaccttaatctctggtatccgggttgcttccaccgggtttttcacaatatgcccttcgacaatagcctctctgaacatgtcagatagaactgatctcattgctcccgccatagtgttttttccctcggttatccacgactcaagaaacttggcaatgtgcctggttgttacttctgccagtattatttcccccattttttcgcgtacggtcgctaattgattaccgcgaatcttgtaggtattaaccgacagactccggcgctgtaataaaacctcatagcgatcaatccatgcggacacagtgaatgagtcagttccttttagcttttcaataagcgccactggtgtgtggttttgcgctatgaagttgtttgcctctatggcctgtgtgatagcgtccctgcgggcgatctgaccgagcggaaattccttgtcagttagcgggttacgccagaaaaaagatttactggccttacggtaggtgaggttcctcggaaggttagcatcgtacttttttcgactcactgatcaacttctccagcaatgcactcggttttccggtgcgcccgtttgggtggtgctgttcaagcacaagtcccactttattcggcttgatataaaacgcgtccggatcaacccgatacgtcctgccatgtaatactggagtcgggtaaatatttccgtttcgcgcccatcgtcttagtgttgtgagaggtggtggatcatcgggataatttaattcaccccaggtttcaagtctcacaaagctcatagtcatgtctctttacttcatgaccgccgccaactatacggtgtggcggtcggtcagggttgaacatcaatgatcagggtaaaatttaaaggactgctgaccgccgcccggtaaaacttttacatctccggcgcgccgtcctgtaaatcctgcccaatgcgcggcgcgtatcctgtcagcctgctcttcagtcaggcagggtcccggaaacgggaagcgagcttaccccacttactaaaagaggatggaactggctgacgtaaaacacgatttatttgtatccataaatagcgaaatgtaacgttttggttatatttaaaagagagaaaatggtcagcaataactttaattgtttgaattaacagataattaatctaccagactgagtgatacagaatatttttacatgaggggtacaaatgagacttaagttgatcgttaaaagttttgcgctggcggggctactctcttccactgcgctgacacctttatttgcacaggaagccccaaaaggtgccactgcttcaaccaagcaagctaacgatgcgctttataaccaacttcctttctctgataacaccgatttcacgaatgcccataaaggctttatcgctggtttacctgaagaggtgattaagggagagcaagggaatgtcatctggaatccacagcagtacgctttcataaaagaaggggaaaaatctcctgacactgttaaccctagtctgtggcgtcagtcccagctaatcaatatcagtggcttgtttgaagtcacagacggcgtctaccagattcgtaaccttgatttatccaacatgacgattatcgaaggtaaagaggggattacggttgtcgatccgctggtttctgcggaaacagccaaagccggtatggatttgtatttcaaaaaccgtggcaataagcctgttgtcgccatcatttatactcatagccatgttgaccactatggcggtgtgcgtggcgttgtcgatgaagcggacgtgaaatccggcaaggtgaaagtgtatgcgcctgctggctttatggaggcagcagtagccgagaatattatggccggcaacgtgatgagccgccgtgccagctatatgtatggcaacctcctgaaaccagatgcctccggccaggttggcgccggactggggacgaccacctctgcggggacggtgacactgattgcgcccactaatatcatcgataaagacggccagaaagaagtgattgatggcctgacttacgactttatgctggcccctggttcggaagccccttcggaaatgctgtggttcatcgaagagaagaaactcatcgaagccgcagaggacgtcactcacaccctgcataacacttactcgctacgtggcgcaaaaattcgtgagccgttgccgtggtcgaaatatatcaacgaagctatagtgcgttggggtgacaaagctgaaattattatggcccagcaccactggccgacctggggtaacgagaatgttgttggtctgctgaaaagccagcgagacctgtatcgttatatcaatgaccagactctgcgcatggccaatgaaggtctgactcgcgacgaaatagcggccaactttaaactaccggatagcctggcaaaaacctgggccaaccgcggctattacggctccatcagccatgacgtaaaagcaacgtatgtgctgtatctcggttggttcgatggcaatccggcaacccttgatgagctgccacccgaagaagcggccaagaaatttgttgaatacatgggcggtgccgatgcgattcttcagaaagctaaagcagactttgaccaggggaactaccgttgggttgctcaggtggtgagtaaggtcgtgtttgccgatccaaataaccagaatgcacgtaaccttgaagccgatgcgctggagcaattggggtatcaggctgaatctggtccatggcgtaacttctacctgaccggtgcgcaggagctgcgtaacggtgtggttaaaggtccgacgccaaatacagcaagtccggataccgttcgggcgatgacccctgaaatgttcttcgactttctggctgtacatatcaacggtgaaaaagcgggtaatgcccgggcggtatttaatattgaccttggcagcgacggcggaaagtacaagcttgagctggaaaatggcgtgctgaaccacacggctaatgctgaagcgaaagatgctgatgccacgattactctgaaccgtgacacgctgaataaaattatcctgaaggaagaaactctgaagcaggctcaagataaaggagaagtcaacgttaccggtaatgctgcgaaactggatgagatgctgggctatatggacaagtttgagttctggttcaatatagttacaccataaatagattccctgcggcgtcaatgctgcagggaagttacttcagacaattctgtacgttttttatactctattttcccttcattctttatatcttgcttcatcttatgtatttgctgctgaagaacatggccctgataccagtcagttctgattctgttatgcacagcctttttcatcagatgacagtaactggttgttgcgtgattcaatggcctgcgagtctggccaacatgcttttcgatgccggttggccatgatgccagtatggttaactggcatcatggcagcataattttgccggataagtcaaccgcagcgatgttaatcgtcctgattatcatctgcatcactgtcacagtgactgcaccagtaacgaggagagactgcgatcgaaccggccagacagagaggaggtagttgtcttcattgctaagtaagagaccttgggggatgaatctccatcacctgtgatgtgtcagacaacctcaatgtacccgcacttaatacctgcgccggcggtttttttaatgtccgggaaatgagcatgtcaaaaaataaccagttataagattataaatagaacacagagaaaatgtcattgcatatggtcaaaaaatagatatatttattgatgatgataattaatagtctcctatatattcatgttgagaatgaagatgctttaaaaatgctcaagttcgttatctatggagacaccgtgaaaaatttaaataaaacattcacttgtaaatatgctgttattcgccgtgatgacatgacagtaattgctgaaatggatttttttcctgactgcaacaggtcattgatgtatcgggatggccgctatgtccggtttctgccgttgttgcaaaatgacatcatggggagcgataccctgattaatgagctgactatcagggccggttatcatgaataatcatcctttgttatactcgtctgcgggctgaactcccaatctactgcgccaacggagagaacgatggcgcatttacaactggtcaagcaaacctcatcagggcttctgctcccggcgacgccggagagtggggatttcctgcgctcagtaaaaatcggtgagtggatacacgccgattttaaacgtgtccgcaactacgcctttcataaacgattttttaaactccttcagcttggtttcgactactggatgccaacgggcggcacggtcacatcgcgggaacagaaacttatctccgggttcgttaattttctttgcgactccgcaggccaggaatataccccggcccttaacgaggcggcggaacagtacctccataacgtagctaccctgcgaaccggggacgtcgcccttcttaagtctttcgatgccttccgggaatgggtaaccgttcaggccgggttttataccgagcatttttatccggatggcagtcgcgggcgccgggcgaaatccatagcattcgccagtatggacgaaaccgagtttcaacaggtctataaagctgtgctgaacgtcctgtggaactggattctgtttcgtaaattttcctctctggaagaagttgaaaatgtggccgcgcatctgctggagttcgcatgaaaatgacatggtttcagcatccggtgtgtaccaccgaagaggcggatgagctggtggcgggataccggcgccgtggcgtgaaggttgagcgttacggtgaggcggaggtgctggaacttgagagcaataatactccgcaacgttggacggttgaggagctgaaagaaatcaggatcgctgcactggcggatctgcgtgcgctaaaaaagctggaggcggcatgacattcgaatcctactttgccgatcatctccgtgctcgctggtagcagttgtgcttataccatttccgggttccatcctgatcgattaccggattttgaaaaactacgtgaagataacgggcggtaccgtatgaatacacaatatctggaatatgtgcgacagcagctcatcgtggcgactgcagatctgagtggcgccacgaaaggtcagttgcaggcatggctggagaacgcccagctctatacgaaaaactatccccgaaaaaaacagcgtatcagggatgaagtgaccggaaaaatgataacgctgaataatccaccgattgctggtaagcaatcactggcgaaaggaagcgcaattccgcttgtgcagcccgtagaatactccacttcctcatggcgccgtgcgcttttgtcactcgaagaacataataaggcctggctattgtggaattacagtgaaaacacctgctgggaatatcaggtcactgtaactcgatgggcttgggaaaaattcagccagcagttggaagggaagcgagttgcgaagaagactttagcacggttgcgccagctcatctggcttgctgcgcaggatgtgaaggcggaactggccagacgtgagacgtatgagtaccaaacgttggcggaactgatgggcgtggcaaaatctacctggacagagacgtacatgtctcattggttagtaatgcgtaacagctttaaacggcttgatagtgatgcgcttatctccgtaacacgatcgcgttcacaacaaaaggcgacaaatttggatataagtcttgcaaaaccgaactgaaatacatatatttcatgtaaatttgatatcatgcctaaaatatgcaagcctgctgaggaacgggatttttgtattaatcagcaataggaattgatgatgttttatcgtgatttatttcaagtttttggtcccgacccgttgtataaggaagaagaaggaattgccatccttcgtgagcaatatgggatcgaagctccagaacaaatttttaagcaaatttattgtgggttatctaataattctgaatttcaaaccttgtatgggcatctaaatcttaaatcactgaagtgggatttggtcagattgaaaacagcagagtttacaaagtttggcagaaatgccacatatcctgattacatgctcgagatttcagaagactttaatgcctgcggcagcaagttttgcattgatgcccgtgaagaggttgcaaaccattggcttaaattcggtacatgggctgaaccaccgatgtttattgagcgttcgcttattattcctggagagagcggcttacaccttatggagggtcatacaagattaggtactttattgggggctattaagtacaaatttgtgcagttagctgatactcatgaactttatatagcctcgcagaaatagtttagagaggattgctcaacaccctcggtaagaattgccacacatcaaactaatgttagggtatcttcgtccacagagtcgaaatggccttatttacatcttcctggcttttcgccggtttttttattcagccctcggaaatcatcatctacacgcttcgttgttaaaaccccgcccgagggcctctcacccttacaaatacagcgccatccaagctatcgggggcgaggcttatgaaaatgcacaacgatccccattcaatggactcacaatctatttttgcgctgattgcgagtctgacttttttcgattgtgagtcgttacagatagccgccgggccagacaccacaacggtaccaggtggcgttatgtgctagaaaccgaaattcttgaacatctcattactactcatatcgttggctggcgcacggttcatcgactccatctgcttgatcaaccctatgctagcaccaacaggccccccgacgctgaaaccgacgctgctggagcgggttttgctggtgctactgctgtgggtttgactacgggtgttacagttgctttggtgtgtccgtgtgagactattttcgctgagctggctatcttcactttgggtgcagtttccctgtgactggctgtgactgtctcctgtggtgtggttgcggctatccgtgtgccactcgctatagcctcccgctggcgcaatgattccgaccgatgtaccgtgggtggcatagggaggcatgaccatgccactacagccaccgagcagtaacgcggtgccgacgataaaaatgaacttacccagagcggtgtttttcattagttcctacctatttcttctcgttggttatttctatgccctgccttggcagggctcgctattattcattcttcaactgtgagatcaagttattttaattaaatcggtattattcttaattgtgttctttatgaataaatatcctccggctatgccggaggatatttattatttcccctcataactgagaggccccacacaaccagagggggatgaatgtccgaatcgatttctggtactgggttagcaggtggcatcctgacaggagccagtgtctatggactgctgacctgtattagctcagacctgaactggttactgtgttgtagcatcgtgggattttgcattttttgatgagtgtcaattactaaattcgtaggcgattcttggtggtgatgtgtgacccatctcttttaaaatgatattggtatactcgactaccgggcctcttggattactgtcttctttgtcctgaaggtgagtcaacgcgtgtacaacttcgtgaataaatgagcgtgttgtatcaaattgttgtgggccatcattactttcatagtactctggtattgaatcatcgtctgtatcatccaggttgagggcaatcacttttctgccttctgaactctccaggtcctcatcagttacggtagtaccaaagttttctccggctcccagcaaccagcgttgttctacatcacgcaattcctgatcgtaggcataattcatcagtctgcggaatgtcccgctttgagtgtatgcatcttcaagtatgcgtgatagcacctcacggcattcatcataggtatcatcatcaatttcgatatcaggatccattcctcctggtccagagataaggtattcagcaagacacattggttccagcctggctttatcatcggtagcaagaccatcatgttggaggcgtaattgcgaaggattatcttggtgttctggaaggtctggaaataccttgctgtcatgaggatgggataatccatatgttgacatcatattattgataaatattggtttaattcccgttggcatgatgagttacacatcctttttattacatggaattaacattctataaatagcatgtttttgtcaaacagaattcactcagcacgcaatcaattaaactaaaagctaaatttgcagtatttgtgcctcacctccattaaaattgtactctgcgtgattttactttcagattctgcaaccacaggcaatcctgttttacaagatattaaaccctgcaacccaaccatttcactcactctagttaccatccgaaatcatcggaggtgaggcttatgaaaatgaatgacaagactcctgaattctgggctgcggttttgaccggactcaaaaatgcgtggccccagatacttggggcgttaatggccggactcattgcctacggccgactgatatacgacggcgccacccgtaaaaataaatggcttgagggcgtcctgtgtggcgctctttccttatgtgtcaccagtgcgcttgatgtggtaggcctgccggtttccatttcgcctttcgttggcggaattattggctttgtcggtgtggacaagctgcgcgaaatcgcaattagcgcactcaaaaaacgtgcaggggttaatgatgagaatcagtgaaaaaggcattaccctaatcaaagagtttgaaggttgtagcctgacagcttatccggacccgggaacggggggagatccctggacgattggttatggctggacccactctgttgacggtaagccagttaagcccggaatgatgattgacgaggctactgccgagcgcttgcttaacactggtttagtcggttatgaaaatgatgtgtccagactggttaaggtcaagttgacgcaaggccagtttgatgcgctggtgtcgttcgcgtacaacctcggcgcccggacattatcctcatcaactctgctgcggaagctaaacgctggtgattacgctggcgccgctgatgagttcctgcgctggaataaggctggtggcaaagtactgaacgggcttacccgtcggcgtgaggcggagcgtgctctgttcctgtcatgatgttcaactggaaaacgatgtttgttggcctgttgcttgtctcgctaattgttgccggtcggctggcaaatcactaccgaaataacgccatcacctacaaagagcagcgcgataccgttactcataggctgacgctggcgaacgcgacaattaccgacatgactaagcgccagcgtgacgttgccgccctcgatgaaaaatacacgaaggaattagccgatgcgaaagctgagaatgatgctttgcgcgatgatgttgccgctggccgccgtcgcctgtacgtcaacgcaacatgccccgcagtgccgacaggtaaatccacctccaccgcccgcatggataatgcagccagccccagactggcagactccgctcaacgggattatttcgccctcaaagagcgagtgaagacgatgcaaaagcaactggaaggggcgcaggcgtacattcgcacccaatgccacggtaatgcaggaaaaactagtaaccaatggtgactgtattaaaaaggtactcccgggcagggggcgccacgggtggcttcgggctcgcgggaatcggctgatttttgattttttagtctctgtcagcactgaaaaataaccttaaaaatcaatacatttactgttttcagtgtcgaggtggtacgttttttgttcgacactgaacgccattttcaccgtatacaggaaaagagcacgactgtggatcaggaaattaaaagcctcgaattaaacatcacacagctttcggccatcactggtgcacaccgacagaccatcgccagcaggctgaagggcgtaaaaacctcaggtgggaacggtagtaacctgaaaatctaccggctggtggatattctgaccgccatgatgacgatgccggctgttaccggggagaatgaccccaataagatgaaaccctcagatcgacgggcatggtttcagtcggaaatgacgcgtattgagctggaaaaggagatgagaactctgatcccggccagcgaggtgctgagcgtttaaggtaggtgatgctgattatacctcccttcttgttggtccttcataccgttttaacgactatctgaatgcttacgtgatgattggtgcagcaaacggacatattaaggataactggggaaattctgacaataaaaccgcctttgcttatggggcaggtattcagcttaacccggttgaaaatattgccgttaatgcgtcttatgagcatacaagtttttccactgatgctgacagtgacgtcaaagctggaacctaggtgcttggcgtaggttacagcttctgacctttaacatcgatacagatttaatgccctccagtgagagggcttttttatgggtaaaacgaaattatgacgatatggctatgttgctgttatttctcaatgacaccacaggcaaaacgtgcaccgccaccacccagtggagcaggtttatcggagtaattgtcaccgcctttatggatcatcaatgagtgacctttcagttctgacagtgatttaaggcgtggtgccagtaacggatacgtggctgtaccatctgcattgacaaccagtccaggcagatcccccaaatgccctttgtcattatatgggccaagatgtttcccggttttttcggggtcaagatgtcctccggccatgagcgccggaacctctttaccgtctttcattcccggcatacaacttgggtttgtgtggacatggaagccgtgaattcctggcgtaagaccatttaggtgaggagtgaaaagcagaccgtaaggtgtctctgaaactgtgatttcacctatgttttctcctgttccgctggacagggcatcgttcatctttacagtcagggtattctctgccattgctgaacaactgatgagcgcaccagctaccagcgacaatattgtgtatttcattagttacctcgttttttggttgtatcgtaaataccattaataaaagcaggtatatttttgcaagataaataataaaggatctctcatatatgcaggatataccacaggaaaccttgagcgagaccaccaaagcggagcagtccgcgaaggtggatttgtgggaatttgatttaaccgcgattggcggtgagcgctttttcttctgtaacgaaccgaacgaaaaaggcgagccgttaacctggcaggggaggcagtacgaaccgtacccgatacaggtacaggattttgagatgaacgggaaaggcgcatctccccgcccgaacctcgttgttgccaatctctttggtctggtcacggggatggcggaggatttgcaaagtctcgtcggcgcgtcagtggtaaggcatcaggtttacagcaagtttcttgatgcggtgaatttcagtaacggcaatccgggcgctgacccggagcaggaggcggtagcgcgctataacgtggagcagttgtcagaactggattcatcaactgctaccattattctggcatcaccggcagaaaccgacggttctgtggtgccggggcgtaccatgctggcggactcctgtccgtgggattaccgggatgaaaactgcggatacgacggcccgcccgtggccgatgagttcgataagcccacctcagacccgaaaaaggataaatgcagccactgcatgaaaggctgtgaaatgcgtaacaatctggtgaatgccggatttttcgcttccatcaacaaactgtcttaacaggttcccatgattaacgatgacattctggcacatgcccgacagtgtgcgcctgcggaatcgtgcggttatgtggtcagaacagcacagggagagcggtattttccgtgtgaaaatctgtctgctgaacccacgatgtattttcgtatatccccggaggattacctgaatgcccggaaccgcggcgacatcgtggcgctggtacacagccatcctgacggtaagccctgtctcagcagtgcggatcgtaccctccagatacaaagcggaacggtctgcagagcgtgctgattaataacacgccggtggtggacgcggacggtaacagtaatattcacggcgtgaccgtggtatatcaggtgggggagacaccacaggcaccgctggaaggttttgaggcttccggcgcggaaacggtgctgggtgtggaagtgaaacacgataatcccgttacccgtactgttgtctcagagaatgtcgaccggctacgcttcacctttggtgtacagatgctgcaggagaccatggacaagggggaccgtaacccgtcctccgtgaatctgctgatacagtttcagcgtagcgggatctggaacacagaatttgatatcactattaacggcaagatcacaacacaatatctggcatcggtagtggctgataatttaccgccgcgcccgttcagtgtccgcatggtcagggtgacaccggacagcaccaccgacaggcttcagaacaaaacgctgtggtcgtcgtatacggaaatcatcgatatccggcagggttatcctggcacagcggttgccggtctgctggtggatgcggaacagttcggcagccagcaggtcacgcgtaactaccacctgcgcggacgtatttttcaggtcccctcaaactatgacccggatacccgcacatataccggcctgtgggacggggcgtttaaaccggcgtacacgaataacccggcgtggtgcacgatggataaactgacccacccccgttacgggctgggcaggcgtatcgggggggcggatgtggataaatgggcgctgtacgccatcgcgcagtactgcgatcaaccggtgccggacggatttggcggcacggaaccccgcatgacgcttaatgcgtatattaccacccagcgtaaggcgtatgacgttctggcggatttctgctcggtgatgcgttgtatgccggtatggaatggccgcaaaatgaccttcatccaggaccgcccctccgataaagcatggacctacaccaacggtaacgtggtgggcgggcgctttaaatacagcttcagtgccctgaaagaccgccataacgcgatagaagtgagatacaccgatccgctgaatggctggcaaacctccacggagctggtggaagaccatgcctcacaggcccgttatggacgcaatctgctgaaaatggacgcgttcggctgtacctcacgtggacaggcgcaccggacggggttgtgggtgatgatgacggagctgctggaaacgcagaccgtggatttttctgtcggtgcggaaggtctgcgtcatacaccgggcgatattattgaggtctgcgacaacgattacgccggggcgtcggtcggtgggcgtatcactgacctggatatttccacccgcacgctgacgcttgaccgggaaataacactaccggaaagcggcgccaccacgctgaatattgtcgggcctgacggtaagccgttcagtacggagattcagtcgcagcccgcaccggatcgggtggtaacgaaagtcctgccggaaaccgtgcagccatacagtatctgggggctgaaactgccctccctgaagcgccgccttttccgttgcgtgcgtattaaggagaatgacgacggcacatacgccatcactgccttgcagcacgttccggaaaaagagtccatcgtggacaacggggcgcactttgacccgttaccggggaccaccaacagcattattccgcccgctgtgcagcatctgacagtcagcacggataacgacagtaccctgtatcaggccaaagcgaagtggggcacgccgcgggtggtaaaagatgtgcgttttgtggtgaggctgaccacaggcagtgggaacgagggcgatccggttcgtctggtgacaacggcgacgaccagcgaaacggagtacgccttccacgaactgccactgggtgactacacgctgacagtcagggcaataaacggttacgggcagcagggtgaaccggcgtccgtggcattcagtattcaggcaccggaagcgccatccacgattgagatgacgccgggttattttcagataacggtgacgccgcaccagactgtctacgatgccagtgtgcagtatgagttctggtactccgccacgcaactggcgactgccgccgatattcagtcaaaagcacagtatctgggcgtcgggtcattctggataaaggatggactgaaaccactgcatgatgcctggttttacgtgcgcagtgtaaatctggctggaaaatcagtatttgcggaagcatccggacgtccgggggatgacgcgaaagggtatctggatttttttaagggactgattacggagacgtatcttggtacggagttgctgaaaaaaaattgacctgacggaggataacgccagcaaactgcaacaattttcgaaggagtggcaggacgctaacgataaatggagcgccacgtggggcgtcaaaatagagcagaccaaagacggcaaatattatgtggccggacttggactgagcatggaagacacgcctgacgggaagataagccagttcctggtggcggcggatcgcattgcttatattaacccggcaaacggaaacgagacgcccggattcgtcatgcagggcgaccagataatcatgaatgaggcgttcctgaaatacctgagcgcgccgaccattaccagtggcgggaatcctccggcattttccctgacgccggatggaaagctgactgcgaaaaatgcggatatcagcggccatatcaacgctgtatctggctcgtttacgggagaaatcaatgccacctccggtaagttttctggcgtgatagaagcaagagagtttgtcggtgatatctgcggctcaaaagtcatgcagggcgtgagcatcagggcgacgaacgacgaacgcagcacctcaacacggtataccgacagcgccacctatcagatagggaaaaccatcacggtgatggctaactgtgagcgtaacggtggcaccggtgccatcaccgtcacgataaatattaacggccaggtgaaaacggcggaggttatgccgtataccgcagggattccggccatgtatcagaccgtcgtcttttcggtctacaccacttcacctgtcgtggatatcagcgtctctctgagggtccgtgggcagtacaccacgtctgcttccgtctggccgctggtgatggtttcccggtcggggagcaacttcacaaactgaccggatttacgacacaacaaccggcaatcaggtttatatctccgaactcggcccgttgcccgaaaacgtcacatcagtttcaccagacggtgaataccagaaatgggatggtaaggcgtgggtgaaggatgaagcggctgaaaaagcagcgcagcttcgtcaggcggaagaaaccaaaagcaggctcctgcaaatggcatctgaaaaaatcgcgccgcttcaggatgcggttgatcttggactcgcaacagatgatgagaaagcgcagctcgacgaatggaaaaaatacagggtgctggtaaaccgggtggataccttaaatcctgactggccggagaaaccatcttagttataaaaatatagctatgtagtagagattgctgctatatgttatatagcagcaatggctattattttgatggttgagtgtataattttagcactggtaaatgacggtttagctccagagttagttcctgggaaaaattatggatactattggttcatattaatcaggaagaggctcgcatattttttggtgtttctgtgttcagggagtgttttggatatatttattagcaatgttttctagtatttgttggaattgctgtggagtcggcatagcacactcattaaacagcggtacaacttctgtcataatgatcttctccgcatagatgttaaaggatgccttctgatgttgactggtaaacatatgtggatacttactgtatgctgatgtaatcaacggagttataaaaggattggctcctgcgccgcttggcgtaaaaacgtcattcttggttgctccgggcagacctgcattttgcgcagcctcgccaatttccttaagaaaaggcgctatgtcgattcctttgctgatgagcaagttacaatactgatctttatacttgctgtaaactgccgatagtatagcttcacgggtctggctggcgtatgcggggtctttactcgcgctacctctaatatctatatcatggagcgtttgaagcataaagtttttaacgactttatttgtcaacactgcccggccctcagatgcgcttcctcggtgaaagtgtgttgcagaagattcagtgttcttatgcgaaataaaacgttccgataattttgaatttaatttgatgaagtgattttttactgcgagaatactttttgctaaagaatttttctcggttgatttttcttttagtggtgtggtttcctgtttttggattctaaagttatggggaaataaagttatttttgtcacggtaatgctccttttatatgtacataactcatttatatatagatagcaggaatacttttattttttatagcaaatgctatgtccatctgattgatgaattagaaaaaatcggctgattagattaatgctcaaatagtactatttttattttccagaaactttcaaaaaatgtccttttcgctcaggaggagccttgctgttctggcattgaaatggagcgtgagctgatcgttgagcgtaccagcgccgggctggcagcggcaagggagcaggggcaaattggtggccgacgaccgaaactaacaacggaacaatgggcgcagccgggcgcctcattagggccggagtaccgtgacagcaggtagcgattatttatgatgttggcgtttcgacgttgtacagaaaatttccggcgagtaacatgcctttgatgccattcatgggaaaataacactcctttaatcagccataagagttaattatataaacttaaatggatttgttaattgaatttcatcaagattaactctatataaaagatttattgtctttgttatggcgtctatatattctgcgctattcattatagcagtgtatttatcgtatgcttcgaagcaatgattttcattgatatattcactgctattgtttttataaatttcatatgactcttcctttttgaaaatgcgcgcatccagccaagggtcaagtatatattccgatattccttttgaatcagtaaaagtcaaaaaaacgaccacatgattccctcctgacgcgctattatacataagggatgtgcttattctggcatcaaatacattatttttcgaaaatcctattccggttagtctttgtggtatatattttgcaataatcgcacctaaaattagcgacatatcagcacagttccctgtgttatattttattgaatcaatggaagaatatattagactcagagatattgggttttctggtctttcagccatagctctgtcaaaagagtttgcttttatagtttgcagaaatttcttgtgatgttctctttgtaaattaagagcgtcgtatttttcctgcgtatcaattttaagcctgtcaatttgcatagcatcataactgtccgatttctttattattgttctgacaaaaacggtacattctgaagcagcattaataatacaggaggataaatcaactgaagtactctgttggttgttacaggcgctcactccagttgtgtcgaatttttctgtagctacatgtccaacatttataatcaattacatttccctgtattcaaaattaagcgatattcttatgtcacgacaacctaacagggactgactacaaagatctttaaagaaacgttcattattgtatctattgatgaactcccttcagatttagaggttgtgcccatggtcgaaaagctcctctacgctcatatacttaacttatcggggacatggtaggttaggatgtgaaaacacagggacagttactgtcactgcgaaggcagcaataaggaggcctatcctgtacgaactgtggaaaactatatcttgttcacgatcacctgcatcgttgacgatgcgcgatcctggaggtttgacgactgcccggtatgatcggtgccgcagccacgtcgtatgcaggaacggcctgcggcaaactggcgatcgttcgatagtgcgaatattgaatggttgccagtcgcggcggattctactggttaagaatggctaatcaatgtgtttaatctgaaaccaggcatctgttcaacttttcgtgatcgcttttgttggcatcactattaagccttcgtctacatgggcatttggcatcgggaggccaccagtggaagaggtcgagtgatatattgggcagtgagtttgattggtcgggggatttatacgcaaaatggttcgaaatatgtcagaattaaaacgtaaaaagtgataactaattgaatctattagaatcaaaaataacgtattctaatcgttaaaatcacttaattaatatgtaacattgtgaatttaaagagaaagatcaattgttgccgtaaacaggaatcgtattcggtctctttttatttggattataaatcaatgggttatgtgtttcccctcgaaattcctcgaaatttcctcgaatttctgtattccggtctttttggttatatcacatccaaatccagtttaacatttcttttacaacaaaatcagagcatcacgtaagctttattatcgcgttcatcgagatagagtttcgtggtgttctctgaggtgtggcccaggagtttttgagcgaattcctcgccgcgttcgtctttgtacaaccgcccgagcaggctacggatctcgtgaaatgtcggtgggttatcactacatttaacgtctgaaatttttctggcttttacaaatttctttgtcagcccatccgggtgaatattcccggtcgggctatttttcctgattccggcactgatcatgaaatcggttctgcttaccagtcggcagcgatcgataaccgtcccggacgtaaccctggcgcctgaagggtcagggatagggggaatgctatcttcattcctgtctttatctgggttacgtgtaggcgaccatcaacgatatcactaaacttcatgttaactatatcctcacggcgttggccagtaaccagcgcgagatccatcgcaagaggaaaccacacaggcagatattctgccgccgtccgcgtggcgttatatgtttccagttgcaggcgttccctggcaaccttaatttcaggtgctcgggttggctcaaccggattcgttgttattcttccttccacaattgcctcacgaaacatgtcagatagtacagacctcatcgcccccgccatcgtgtttttaccttccgcgatccatgactccagaaactcagcaatatgccgcgtggtcacctctgccagtatcatttcccccattttttcgcgtacggtcgctaattgattactgcgaatcttgtaggtattaaccgacagactccggcgctgtaataaaacctcatagcgatcaatccatgcggacacagtgaatgagtccgttccttttagtttttcaataagcgccactggcgtgtggttttgcgctatgaagttgtacctgatccaccgtccgttgtaatttcctgtcctgtatcgccagccgtttcctgctggttgctctctttcggcgtttctccatctctttctgttctggcttccgttttttcggtctggtttgaggggggcgggaatagcgctgatacatcgaaagtcccgtccgcgtttctggtgacagcctccggctctgctgctggttgtttttcctcctgcaccacttcttctttttcaccctgatttgaggcgctgtaattgttatgaacccacttcggatcgttcgggtcgctgatgccttcgacatattcaccgcgcgcggctgccagttgtttaccaacatcaaccgggtttttgggtggaatgtttttacgtgcttcgtgcagttctgcccgtattttctggtagcctgcttctgtctggcttacaggtggttcattctccagcggctgtggggccggatgatgttcagttgtgtcctgttccactgcttcaggcgttgctggttcatctgccagttcgcctgtcggttgcggtttttcttcatcacactgaaatctccctgcctcaatatcccgcagacatttgcccgcctgactaagccttgctgcattttcttcatgggttgttggggtgttatcaggcacatattcgtaccagtccggatcgcgaacgccatgaacggcaagaaagctttcgcaccacgttcggcgaagatcaggattaccgggctggagaattacaccagatgtggcgttgcactgaaactggatctagtggcgaatccaggacagcttgagctagaacgtcatgccgcccgatccgcagcgtggctttttgtgactaaagggtgtctgaaatattccggcgacctggtacgtgttacgcagatcatcaacggagggtagaacggcatcggtgatcggcgggagcgctttgagaaagcaaaatcggtgctggtatgaatctgttatctgctcttctgaaaagatactggttgcagctggtgtttattttgctgatggctggtgcgtttatcgccggtaatgtctggagtgacaggggctggcaaaaaaaatgggcagatcgcgacagcgctgaatcctctcaggaagtcaacgcccagaccgccgcccgtattattgaacagggccgcgttattgcccgtgatgaggctgtgaaagatgcacaagcgcaagccgctaaatctgctgccactgctgctggcctgtctgccactgttagccagctgcgtaccgaagcaaaaaaacttgccacccgcctggacgccgcaaagcacaccgcaaatcttgccgctgccgtcagaagcaaaacaaccaacgccgacgccagaatgcttgccaacatgctcggagatattgcagaagaagctaaacattatgctggaatcgctgacgagcgctaccgggcaggaatgacgtgtgaacgagtatatgattcggtgagagagtcaaataattacaggaggcattgaaactccccctgtaatattgctgtaaaaaagtgactacatatcatcagatggaaccagatgaataagaacaggtttttcaccagatgaaactgataagtactcactcagttttgatatagctgaaatctgtctgaataacctgtcggggtgctggaataacaactttccggaaattcttctgcaatggattttacttttagtgaccattcgcctccttatctgtagaggtgggtaacgaatttaaaaagcattctgcttacttagggggaacatcctgatgactgcctgcaatattgcaaattccattttcattgtatgaaccacctgaatcaaggcactcatcttccatcaggaatttctgcgaccacatacctgcataaaaaacgataataatggctacgataatagtgatgatgtttttcatttatgttctctgtgtgttgttattgaaaatgataatcaatatcgcaaaatgaaataaataatcattaagtggtagttgttgataattgttcgtattttaaaaaggtactcccggcggggcggtctgccacggggcggcagcggcgcgggatttggcgcatttttgatttttcatgcatcatcatcatgttgtaactctctgttttaatgtcatttatttttaaaagatgatggtttgtatgttttttgttcattatattttgtttttccgggggaaggcgcgctaagaaacagccccagaggtaaaaatggacggcgaactgaagaacctcaaatgcaatatctgtcagcttgccgctattacagggttacatcgacagacggttgtcagtcgcctctcgggcgttcccctggcaccgggaagcaatgaaaaaaacaagctgtatctcctgacggatgtgatccgcgtactgatggaaacgcccgtttcccaggctgctgaacatcaggacccgaataaaatgactccaaaagagcgtaagaactggtttgactccgaaaaggggcgtttctggctggaaaaagagatgaagcaggtcgtcccgttgccggaagtccgtcaacaaatggcggcgatagtcaaggccattacgcaggtacttgaagtctggtcggataaactggaaagggataagggatggtctgcggatcagctaaacgaggcccaggatgtggtggatgaggccagaatactgttagttaaggcaatacaggagaccgcagacgatgacggggaataaatatggctccgcagcggcagtacgccgggaggttgctgaatatctcaggcctccacgcagaatgccggtagcggaaggaataaaacaatttatgtttgttccccgcggtgccaatacggcggttccttgggatgacacgttagcgtctcagtccttcccgaaatgacaacaacgtccacgataaaatgtttcgtgatggttcattcctgcaaattggctggccgtccataaccgttttttcttcgtcggattacaagcgggtggcgctgaccgactatgaccgtttccctgaagatatcgatggcgagggagatggtttttccctggcatccaaacgtaccaccacctttatgtctgcggggatgacaccggcagagagttcgcctggtcgggaaatcaccgatgtgaaatggcggcgttcttcgccgcacgaggccccacccacgacaggcattctttctctttataaccggggcgatcgccgtcggtggtactggccctgtccacactgcggcgactggttccagtccgcgatggaaaacatggtggggtatgggtgaggtacagaccaaagccccgctggacagtctggcactgaccggtacgccaacggcaccaatgccggaaaccacagctgcaggtattgaaattgccacggcagcgtttgtggctgcgaaagtggcgcagttggttggttctgcgccggaagcgctggacaccctgcaggaactggctgacgcgttgggaaacgatccgaactttgccatcacggtactgaataaactggcgggcaagcagccgctggacgaaaccctgacggcgctgtcaggaaaaagcgctgatggttttatcgaatacgttggtttacgggaaacgataaatcatgccgccgatgcgttacataaatcacagaacggtggcgatattccggaaaagccgctgtttgtacaaaatatcggagcgctccctgcatcaggtacggctgttgcagcgaacagactggcatcacgcggcgggcttccggcactgactggtacgacaagaggcagtgatagcggcctgataatgggcgaggtttacaataacggttacccaacgcaatacggaaatattttgcgtctgaccggaaccggtgatggagagtattaatcggatggagtggggttaatggtgctcctgcacctgcatatattcgcagccatcgagataccgccgacgctgagtggtcagaatgggcgatgttctacacctcactaaatccgccaccggattcgtatccagtaggtgcggcgatagcatggccgtctgatgctactccggcaggttacgctctgatgcaggggcaatcgtttgataaatctgcttacccgttactggctatagcgtatccgtccggcattatccctgacatgtgaggctggacaatcaaaggtaaacccgccagtgggcgagctgtactttctcaggagatggacggcaacaaatcgcactcgtacaccgcgcgggcgcaggatatcgacttagggacaaaaactacctcatcctttgattacggcacgaaatcgaccaataccacgggcaatcatactaaccagttcggcggttatatcaactcatactggggagattccaatcacacttcatttcagctaggaggtggtgcgtggacacaggccgctggcgaccatgcgcatacagtttatatcggaggacacgagcacaccatgtatatcggtccacacggacacgtcgttattgtggtcgcagacggtaatgcggaaacctttggtcttatggacggcggtgtggatgctgctattacggcatatttcgggtcgcaattacaggaacgggtacagcaaaatatcatccgtgaatacctgggggaacagcccgtcggcaccgcctttgttattgaaacgggtaacagtaaacatccgtggctggttcacgccccgacgatgcgcgttccgctgattattgacggcaccgacgcggtttataatgcaacacgggctgcgttactggcaatttttcagcacaataaaagcgccggagaagaccggaaaattacatctgttgcattacctgcaatgggggccggatgtggtcaggtccccccggacagcgtcgcccggcaaattgtactgatatagcccctcctgatattccctccagtcatattgctgtttttgacgctgaaacccaaacgtggagtctgcaggaggatcaccgcggcgagacggtttacgacacaacaaccggcaatcaggtttatatctccgatcttggtccgctacctgaaaacgtcacatcagtttcaccaggtggtggatacaaaaaatgggatagtaaggctcaggtctggatgaatgatgaagctgcggaggccgcagccagacttcgtgaagctgaaggaacgaaaaacagactcctgcaaataacgtctgaaaaaatcgcgccgttacaggatgcagtggatctggacgaagcaaccaataaagaaaaagcttctcttctggcatggagaaagtaccgggtacaggtaaaccgtgttgatactttaaagcctgtctggccggagaaaccagccagtagtttataatttgtcaggaaagctcaggccttatttatagcaaatatgaagaaggcctgtctgtcataactgatatggttactggttagtatattaaatttatactcaataacctctacacattttaaaccaatcttcagggaagggtatgccagcaggccaaagagtacaccacttttgaggaattggcttaattgtttcttcttttttatgatcttgagagtctgccgctattgtaagagcagaatatagtgaagatggtaatattaaaaccattgctaaaaatacgctcttaacgtgtttcataatatgttacctgttaaattgtggcacactatccttacggttacagcatcctttactatagatattaaacgttattcattaccatcaggtgagtaaataaaaaccatttataaaatatttaacttaaataaaaatgataagcactattatattttatttccaatgtaaattaattcatgtgaaagtgatttcatgtgcttttcaaatcatggctggctcgcccccccggaggaacaggccagttaacattatcaggagtgtttgttatatcaatcaacttcacttcattcttgtaagccagccacactaacagttttgatcctgtccgcgtattgtggatacagccttaagcgaggttctggttttcaaattgttccggactgagatcgccgcagaccctgacggcgcaggctggacgctatcgtttttacattgtacctcaggccccaggttcacttcctcagcaagccggggagcaccgtagcgctgttttgcctggctgaaggcctctcttacgacattgtcgcagtcctgccggaactgctggtgggtattaacgactgtgcgccttgtttgccaatgccgattccgaactcattctgacgccgatcatcattgccgtgttgctcgcgcctggtttcagcaaaagcaccacgctggctatactgcatttctttttccgcagggagaagtgagtaaatgagtatggaaatggagctttccctataatggcggctgaagctaatcatgtgtcatgtattgcaaatgtcaaagtgataaataaagtttcaacagtctgtgttttttgtgaaaacgactcgctatggtgctaaccctatatgagggactgattgaacatcagatatatcccggcttatttaatactgcttactatgagggtaataatatgttttctcttattaaatcacgtaaagttttattcataacaactcttctgctgcccagccagcgttcgctctggggtgcttaggggacggtggtagcactaaagaatgtgcagaggtttgttccctggcggcaggtttaggcccccttggttttctcatttgcttttaatgtctgagaagtggttatcctgagcctttcctgttcatgtagtgaaggcccatccagaacatcatatttaaactatcgtaatggaacaaagagttactttaaagagctctttgttcctttaaccttgatgaagatggtcaacgtctggttttacaaatccgatacagacaggatagctgctatgtttgttatccatctggaaggttatctggctgatagcatcaagcgccagttgtggccattgcttcagtacccagtgtgccactacagtgccactacattggtggccgtaggccaaaactgacgccggagcaatgggcgcaggcagggtgccttattagggcaggagtaccgcgacagcaggtagcgattatttatgatgcggggctgtcgacgctgtacagaaaattccctgtgttagggtaatgcagtatttccacggtgcgtgccacccaaatatgtgctgtggatgctttatagggtgtgccatttttgtgtcaaacatggtgaagcatcattctatttctaacatcatgtgccattgagttgagcaatgtgaatgcggaaatgtgtatttgaaacagttagttaaatgtgattctactaattcgtaatgcgaaggttgtaagtttgattcctgttattgcaacatttcaatgttactgtaacttccgtgttagcccataaccattccaatttctacaagacaggtgcttgctatatatttaccaatcagtcattttaaaagtgcgtcataaccggagaactgccctcgtcaggaggcctgttttcagaaaggcaatatcctgtttcgacagtagcttatatgtgaccgggttagcagcacattcccctccgccacattccagtacagttgaaataaggttggcagtaatcagtaacagaaatacccaaccgacaatactgaacaggtccggattaatattcaatgaacgaaatgcaacattcatgctactgattgccagaaccaccgcaacagcaataataatcagaattgacgtaatcagagtccaggtataaaagtgtaatccaaaaaatgcagaaccatatcctgtgtcaccgggcatgatatgcaaacatatttgccgggatgccataactccggtcaggatactgccaataattaccatcccgtaatgtatacctcgtagaccaaagcagaggttaaataaaaagccaaaaccggcgatgatgaggccagcccgctgtaataagcaaattggacaaggcagctcatgcctgacgagttgataataaaaggctacaaccagagcaacgcatatcccaaggagtcccacctgattaatcagatgaacaagtgttgttggatgatgatgcgttttcatacacactccttaaaatgacaaagtcagcgaattggtcatatgatgaatgaatgataaaatagtgacgatgagtaaaacggcccacagaatgtagctgactttatcctttctgtttatggcccccattgccacgctcagtgcaagcaagaatggcagaaacatgaacataaaaaactcctttattacattgcttgttaatataatcgctgtgtattaccgggtctgtattccagcttatccaccccgcattagccggagctcagtaaggcatcaggaattatttgcgttactataaatcgattatttctgtgatgagttatcccggcatctgctggttacagggatatttctggcgacaagagtaagaaatatcccgataactaatggtataataagcagcattgagtgtgttgaaatagcatatccataaatatagtcttccagacttaccgcaatcagcggaaagataagaaatacaagcgaagcctggaaggcattagccttttgctgaagcgcaaagtagcacaggataccaaaaactccggcaaaagccccgagatacagggtagctaatattgagtgtactgagaaggttgatacttgtggtctttcaaaaaaccatcctgtcgcagaaagtatcaacccagctaaaaggcacgggagcgcattaaatgtgataacagagacagtacaacttcttttcttacattgtgtatatattatggcatggattaacacagcagaaataagcgcagtgataccctgccagtgactctctgtacttgtattcgtttcttcaagaagtatccccgtcaatgcagtgattgcgatagttaagcccgcgatctgcattagtttcgctttttcatttagaaacaaaaccgatgctatcaaaacggccacaggcatattcgcaaagataatggcggcaagcccagagttgacataggtttcaccataaatcattagtgagaaaggaatgcaaaaataaaagatgcatatcacaaactggaataatcgttgtccgggaggaaacaacagtgttttttttcttaaccatgcaatgatgattaaaaaaggtgctgcaaacataaacctcattccggttgcaaacactggagggatagtttcaacggcaattcgcatggccaaccatgtagtcccccaagtcagtgaaactagcatgaataatatagatatcgacaccttgcgcataagatcctctccgtaaaaaaattaatttagctttttagctagaaaaaagtagcgttttcttcactgtgttttttatatgtttagataaaaatttctctatcagaagacgcagttatgctgaatgagaaaaataataaatgactcaggctgttaccacacgattgtccactgcgcctgtaagacctggcagcagttgtcgatttaatgtctattcttgctggaaggcataaaacgccttgaagatgaagagctcatcattagtcgggtcccttgttgagccaggacaagtttaacttatcgctttcaacccttacgatgataaatgatcttatccacccataatggacatacggctaaatgagtaaattctcaagtaagaggcaggatctgtatcaaccagtaagaagccccggaaacagcaccggcggaattccgtcaggaagctctgaaactcgctgaatgtacgttgcccgccaacgattgttaatcagcgccatagcaagaataattgtttgtttcacaaggagatagaaaaaactatagctttgcgccggggcggaggcaggaggagataactcgttgtaatagaatgtttttatatggcgaccttaagagaaatgctttcgcctcggtataccacccgctatgaagacctgcttcaggttaagtggcaggtttatcccgattttcacattcctgatgtgatggaaccgcagccacatcgtatgcaagaacgggctgcggcaagctggcgatcgttcgatagtgcgagtattgaatggttgccagttgcggcggattttacttgttcaggatgactaaccaatgtgtttaatctgaaactagccacctgttcaacttttcgcgatcgcttttgttggcatcactattaagccttcgtctacatgggtatttggcatcgggagtcccccaatggaagaggggagtgatgtattgggcagttaatttgtttggtcgggggatttatacgcaaaatggcccgaaatatgtccgaattaaaacgtaaaaagtgataactaattgaatctattagaatcaaaaataacgtgttctaatcgttaaaatcacttaattaatatgtaacattatgaatttaaagagaaagatcaattgttgccgtaaacaggaatcgtattctgtccctttttttcttataaatcagttgcttatgatcaataatccaaagtttccgaaattttccagaatttctgtattccgggctttttcgttatatcagatccaaatccagtttaacatttcttttacagcaaaagcagagcatcacgtaagctttattatcgcgttcatcgagatagagtttcgtggtgttctcggaagtatgtcccaggagtttctgagcaaacccttccccgtaagcatctttatatagtcgtccggataagctgcggatctcgtgaaatgtcggtgggttatcactaaatttattccggtaaattttcgtgccgcaacaaattttttagtcaggctgtcaggatgaatactcccattcgggcggtttttgcgtatgccagcgctgataaggtattcgctacggcttaccaggcggcaacgatcaatcaccgtactgaggcgtaaacccatggaaggaggggtgagcgaaagtggcagagcgattttcatctcggtcttgatttgcttaacgtacagtcgctcatcaataatgtggctgaactgagactgtaattaaaattgtgtaattgcctgtttttgatatgttcactccagtaacggagacaggcaattatggacgaaaagaaactcaaagcccttgcggttgaactggctaaaggccttaataccgaagccgacctcaatccgttttcccgtatgctgacgaaattaaccgtcgaaacggcgctcaatgcggagctggctgaccaccccgggtatgagaaaaatgcgcccaaaacaggctcaaacacccgcaatggctactcgtccaaaacggtgttgtgcgatgacggcgagatagaactgaacacgccgcgtgaccgtgaaaataccttcgaaccgcagctgattaagaagcaccagacgcgcattacgcagatggacagccaaattttatccctctacgccaaaggcatgactacccgcgaaatcgtcgccaccttcaaagagatgtacgacgccaatgtgtcaccctcgctgatatctaaagtcaccgacgccgtaaaagagcaggtcactgagaggcaaaaccggcaaccggatgcgctgtaccccattgtttatatggactgcattgtcgtcaaagtccgtcagaatggcagcgtaatcaacaaagccgtcttcctggcactgggtatcaacaccgaaggccagaaagagttactgggtatatggctggccgaaaatgaaggcgaaaagttctggctaagcgtgctgacggagctgaaaacccggggcgttcaggacatcctgattgcctgtgtggatggtctgaagggcttcccggatgcgataaacagcgtcttcccgcaaacccatatccagctgtgcattatccatatggtgcgtaacagcctgaaatacgtagcctggaaagactacaaagccgtcaccagcggccggaagatggtctatcaggccccgaccgaagaggcggcactgatggcgatggatgcgttcgcgaaagcccgggacgataaatatccgcaaatcagcaaaagctggcgtgcgcactgggaaaacctcaatacgctcttcagttatccgccggatatccgcaaggccatctacacgacaaacacaatcgaatccttgaacagcgtgatccgtgccgcgattaagaaacgcaaggtgttcccgacggatgactcagtacgaaaagttatttatctggcaatcaaggatgcgtcaaaaaatggagtatgccgatccagaactggtggctggcgatgagccgttttattatcgagttcggtgaccgcctgagcgatcacctttaataactgggcagttacacagaattactgacaggctcattcttttgtgttgcgcatctctgtttctattgttttagatagccatgagagctctgttgctgagagttttagtcgtggggttctttcttctgtaccgggtggtcgcatttcaaaactgcaggaacatctgctgaatactgtatactcctgtattttgcatgttgttgagatcagtgtgcaattcctcggtactggcttgttctgtataggtctggagatttctgggtagtgtccttgtggacctgaacatatgtttttgattgaaaatggcatcgtgttttatcctttacgctgtgaaatgttgttttgtgctcttctgttgtgattggtgatgtgacgggatcgtccatgcacccttccttttattgacggcgtatcagtccattgatgccatgctcgcttaatttgtccagcatcagcaagccgtcgttttctttctgctgcaattcaagcaacttaaaccgtatttcgttaagtaaaggtttaataactccgcgcttgcgaaccacctttctgataacgtctttttcgaagtataaacggcagaagtgattttcataattcgcctacactcttcaccctgcgctggcaaatcttcaacgctgaaaggctggggagaagggcgtccagttgctgaacggagagcgaaccatacgccctgattccacgtgttatcaaacttcataccgtggttatcatccagacaaggcgcttgaggttgctcatgtcttttggggaaagaggttcggtggtgggtactggatatcctggatcgggaagtgggttccactggtgccaaatacagggggctggtaaaccgggtggatacctcaaatcctgacaggccagagcaccagcctgataaaatcgtattactgatttctaaccagtggcacattaattgtaccggctcagactccagctgacagtctgctttaagctgtgagtagcggacgtggcctgcccccaggagtaaaaacaaactttctattgatacatttaattaacttatttataacgttatattccaaatgcaaacttgttcaattggatatgtatgaacattcaaatcacacatcaagttactgaatttgataaagaagaactattagccggattaagaagctacaatgctcagttcgtcgattttagtaaaaatgggcagcttggggtctactgcagaaacgaaagcggcgaaatggtaggcggattaattgctgacagaaaaggtccgtggctctgcatcgactatctttgggtaagtgaatctgcaaggaactgcggtctggggagcaaacttatggcgatggccgaaaaagaaggtttgcggaaaggctgtgttcatggacttgtagatacctttagcttccaggctctccctttttatgaaaaacagggttatatacttcaaatgtcgctaccggactttcctaaagtaggttcgcaaaggcattatttaattaagctcggtttatagctttgctgcatttgaatacccatagctttatgaaagctgtaatcaggtagctttaaaatatatcgtaccgttggcctgtacacaccatgatcagcgtccgcttctggcacagggcggacagtcagattaggtttggctgtcagctcacatttgagctaataccccctggcacggctagagatactcagacagccgcttgtaggcggcatggtacggatacaaaaacatattgcgctgttatataaactgtaaactgggctgtgcgtataatacgaatctttcactcagagaaacctgctgacagcgttagtactccattaattaattttgtactaaatctctgtggtatggcacaggcgtttagaagacaggtcaattgcgatctgctagctgggatttcgtcgcgccgctcaaaaatgcacagagtttttcacccgccgtcaatggctcaatgggcgtttttccgagggcggtctcagtcatgacgatggcaggaccaataagcatggaccatacttcactcgcgtcttgctcaagcgatgtgaaggcaaggaacagtgttttatctgaaggaaagcggtgctgagtattaaaaagtttcagccaggcgcgggactgccggtcggcctgtgctgatcgcgtgccgaagcggagtactctttttagtatggcgatacccacaatgcctggccccagaataaagggactcccgacgtttatggtgacgccgaccccgagaaaaacgagggcgaatgacagcacgttatctactcttctggcaagagtactgtatagcttttccagagagtaccggtaaagaatttgataactgatttcatccttgctcatacatctccagatgttttttcgattacgctccggtatgctcccggaatcctgacagattctgcaattatgccacacttcctggagggtattaattagatagaatataaatagaaggcaaatattttgagcttttagtcgatatcgctttgaatatcatttctcctgcaccaggagatgctgttgtcgagaatcgtgtcaaacgttgctgcgtcggtcggactgcacagggtaactctcgcagtcagactctcattatggtctctaaattggataacccgcagtcgtaacacgccggatgtcacgactgacgctattattaccctggcttgttaaagcggcatgaccacattttctatatataataattggttgtctttcgaccagtattgtcgagttttttggtttaattcaacaatccatttaaaaacgcctgccgttgccagatcagtacagtatttttcataggaatgctcccccgaaaagtgtttagctgaaatcaattttattaattgcgtattcggtgttgaattgactttaatcagctttctattgcttttaatagaaatgaagtggcctgcatgagtgataattttcacattgccggtagcaacaaaatagatgtaataagcgatattattatattccagatcgattagaaatgcgttgaaatttgcatcctttctgacgcgctcgaaaaagtggttaagcataagctgtaattccatttgttaacctattgtaagttataatgttatatgttgtgttagagtattgttgcttaaaagcagccatacagatatgttacctaaaagcaataataatcacctggtatcatatagtttacgttatgattggaatagtgttgcaattgttactgattatttctcgtagcgcgtttttttgaccactaatagatgcgtcaatccatttcatttgtagtttttctgaacgtcatgaaaagtcataatatataaaaatcagttaattaattgatgtttagataaggattacagtgacggagagatttggcgtggcgactttataggttttgaaaaagcggctaactcgctggcaggataattggtagccagcctgcgaatgggggcaaaatcgtaacaacatcagcataaataataatattcatgaatgttttatgtgacgcagtagttgaattgaagtgatgttttacctgttcaggattgtcccgataaaaatgttcctcgataaaagtcgatcaccttgcgccgaaaaaaaacaggctaagtgacagaagaacaaaatccatcaggaaaataaaatttataaatatcaatgagtaaaaatggttgtggagaaggtggctattttttgaaagcaagaaatataaacaaagtgtagctatgcatagttatctaaaaggagaactaccgtgactaacataacactatccacccagcactacagaatccatagaagtgacgttgaaccagtaaaagaaaaaacaacggagaaggacatttttgcaaaaagtattactgccgttagaaatagctttatcagcctgtcgacgagtctgtcagatcgttttagcctgcatcaacaaacagacataccgactacccattttcatcgtgggaacgcttctgagggtagggcggtattaaccagtaaaactgttaaagattttatgctgcaaaagctcaatagtctggatatcaaaggtaatgcgagtaaagatccggcctatgctcgtcagacatgcgaagccatattatcagccgtgtacagtaataataaagatcaatgttgtaaattactcatcagtaaaggggtcagtattaccccctttttgaaagagataggagaggctgcgcagaatgcggagctacctggggagataaaaaatggcgtatttactccaggtggggcaggggcgaatccttttgtcgtccccctcattgcttccgcgagtattaaatatccgcatatgtttataaatcataatcagcaggtatcttttaaagcgtatgctgagaaaatcgttatgaaagaggttacgccgctgtttaataaggggacgatgccaacgccacaacaatttcagttaactatagaaaatattgcgaataagtatcttcagaatgcctcctgatggtagtaaatacaatactgctattaaccatatgaattaatagcagattttctgaaactatatattcgtttttatggcgacgcttttaacaaaacgtcgtcatctttattttaatataaaaatcaaatggataaccttaaaacttaaaataattgttattactctaaatacctgcacaaccagacagctttttttgtaacgctgcgtgttgttaagtctatgatacccgcgcacggatgatgtctcgataaggattaatggtctgttaactgtcaggagaggttatgccgcctttaaaaaaaattgtgctgcgcctgtttgtgggggcgatggtcgccacggtaacgacacctgcattggcgctggtttgccttgaggatcactccgctaaagagtgtgctatatcgtgtgctgaggcgatgtggtttatgtttccgatatgtttttaaggaggaagagtattgaaggtgaacaggcgatagtgagtagctcgctgcgccaggggataaccctcccctggcgcagccagttatattttattgcgatgataacaaagcatttactcgctaatggtgaaattcgctatttacaacagcgcacgcttactaagcaaaaaaatctgcacacgctatctttttatatctgtcctggataatgaacgacaggaaaaacatgatgcggcctgaagagatttatcagcgaatagaggcaaagaattggcggcatgtctgggtggttggcgatattcacggctgtttttcaatgttaatgaaaaggttacgtgagtgtcgatttgatccgcaacaagacttgttagtttctgtgggcgatctcattgatagaggcccggacagcttgggttgcctggctttactgcgtgagtcctggatgatggcggttcgcggcaatcatgaacaaatggcgctggatgcgcgggcctcattgcagtcgacgctgtggttgatgaatggtggcgactggtttacccgcctgaccgctgaacacgctgcgcaagctgaagcgctttttatcctttgtcagcggctgccctggatactggaagttcgctgccgccatagcacgcatgtgatcgctcatgctgattaccccgcgtcaacctatcaatggcaaagaaaagtcgatttacatcaggttctctggagtcgcgaacggctcataaataagcgcggcgggattagcggagccgatcatttttggtttggccatacgccgttgcgccggcgcatggattttgccaacgtacactatattgatacgggcgcggtatttggcgggcaattgacgttagcgcggatacaatagcggtatcagcgcccagggttaaaaatcgctatattgctgcgcaggccgccagaagccatcgataaaatcctctaccggaaaacagccgccatggcgaatccgttgatcgtccatcgaataaagacattgctgctcggtatcgtagatgtccacgacaatatcctcgcatcctccatccaggtaacatacaaaaagtaccagcgcgaacattacatcctcaatgttaactactttacacgatagtgtaggagaggttagcgcaggggggaaatgagaaaaggaagaataaataacccgcctggcgacgggttctttttgagtcaggcaagacgcatgacccaggcatcagatttaggatcgtaatgagtacggaacaaaacggaatgttccccgttgagaatggcgggaacgctggtttcggcatcccaggcgtccagttgcatacataaatccggatcggatttacaggggattgttaacgttcgctcccccggcgattcgccatgtaattcggcatcgtcgatttcaaaagcgccaatgcgcacactggttttcatcatcgtgctctccgttaatacgctaattgtggtacgaccagtttagccgtccatttttcagcgtagtcaacgtacgcaaaagcgccagtcaaaaagtgcggtttttttgtgcgccttttaactattaccagtaaagagtttgccatcacgtaccagttcacgcgggtaactgttctttattctggcgccgatacgttttgccagaccaagtggctgatgctggaacgtcaccaggacatcatcagcggcagggggtgtttgcggataaatatcccgaccgcgataccactcctccgcctcttgcacagaaagttcgaacgcgtgagcatgagtcgggcaggcaagggctatcgtcgcctcatgttgccagcgatagcctttattatgactttcggccagcttaatgccgagccgggaaaaacggacttttccgatcagtgattcaatttctgccgggaacagccagacctctttttcacgctgccaaagatggagattttcatcccataacagtccgacggcgttggccgcctgggtaacgtgtaatgcttcgcggcctttgaggggggtaaaaggaaacgcccccactttataccccggcgcgggcatggctggaagggatgacattttacgcagacgtgcgacgaagaatccttcgcagtcgtaaatttgcgggaagacgtgcaggaagccttccggggtgagggcacggtcagcgtcaggaaacagatcacccagcggcaaaaattcaacggcgtcggcgtaggtctctttcagccagaggcagacctcttcgttttcctggcgatttaacgtgcaggtggagtagaccagcgtgccgccgggtcgtaaagcatgaaaagcgctgttgagcagttcccgctgtgtcgccgcgatatccagattgctttctggcgaccagttttttagcgcatcaggatctttacgtactacgccttcgccagagcagggcgcatccagcaggatagcgtcaaacatctccggtaacgcagcgccaaatacgcggccatcgaaatgcgtcagtgcggtattggcgattccacatcggctgatattagcgtgcagaactttgacgcggctggccgaaaattcgttggccagaatggcgccgcggttccccatgcgggcagcgatctgcgtggttttggagccaggcgccgctgccatatccatgacccgctgcggatgattatcatcggcgaacagggccgcgaccggcagcatcgaactggcctcctgaatgtaaaacaggccgcttaaatgctcagcggtactgccaagcggcaatgcctcttcatcatcgcgctcgatccagaatccttcatgacaccacggaattggcgtgagcgaccagccgtagggcgcgattagggcaaggaaatcagccacggatattttaagcgtattgatgcgtatactgcggcgcaacgggcgttggcaggccgaaataaattcatcaaaagagagcgtggaaggcattgcttcacgcatttgcgtcagaaaagcgtcaggaaaatagacagcgtgttgagccacaggtgtatcgccggcaaaaaaacaggcgcgcagtgtagcataaaacgctccggcgcgagtacgccggagccgggtgtttaacgtggcagagcggtaccccattcacgccactctttcggttcgctctcttgtaacaggaaatgcttaccggcttgcgcttttggcgccagcggcgtacctggtggagtagcgaaggcgataccgccacggatgaactgattaaatgtccccgttttcaccacgccgcctgtcagaccaaagtcgagactatagccggaggcaagccagaatacggagttattacgcaccagatattggtaacgcttactgatgcgcaaggtgatcatcacgcgatcggagagcgaccccagggacattccggtgacggttcccacttcgataccgcgaaacaggacgggggtaccaatattaagcgagcctgcttctggcgcctccacgacgatgcttaacccatccagatagcgtgagtcggtaatcgtggcttcctgcagttcaaagtcgcgccgtgccgcgccgcgtcctggctcaacgttaatatagggctggagaatcgtatccagatgctcgacgcccgccgcggaaatttgtggcgtgataacggaaaaacgtgtcccggcgcgggcaaatgtctgtacatactccggataaagtacggcttttgcctgcacttcattacgtgcggtgatcaattccagcgtctggatctggccgatatcaataccgaggtaacgaatgggcatcccttccgccaattttccagcgtcgaacgcgtgcagcgtaatttgtccgcctaccgcgcgggcggaagtttctgaagcataaagaatgcgtttatcgcctttgcgccgactggcgctggcgccgctcaggttatcaaaactaatggcccctttcagcgcgcgggagagtggcgaggcctgtaccgttaggccgctgccgttaagttgcaccttcgcgccgccttccgcccagaacacgctattgctggttaacaggtggcgatattccggcttaatatgcaggtcgatgtcaaaggtattggcgcgtgggcgaacggtgatgacttcgcctacttcaaattttcgatacagcacgacggaacctgcctggacatccggcaacgtttcggctgtcagcgtcagggtggtagtcggtaagtcactgagactattttccagcgctttttccaggttagcatagagcgggtaggtggatttcatcttcccgctcgtaccgggtaaaatacgaattccgccgtcaatccactcgctggcgctggcgccgaggaactctacgccgtcaaggccgactttgacatccacccggctgttgaccacgaatttactgtcgccctgtaccaaatcccggtgctgcggttcaatcgcgacggtgaatgacacgcctttactggataagttgcgctcaatgacctggccaatttttacgccatgtaaaattaacggctggcccggttcgatgccgtaactttccggggccgtcagcgtcagggttaaggcattcgcctcatgcagcagggccttttcacccggcaccaccacaaattcactgcgcggttcgccgtcgcccggcaccagctcgaaggtttttccggttaacaacgaactgatattcgcgtcgctcagcgacagtttgggattgcgtaactcaatacgcgtattttcccgcatcagcggaacaacgctgggatcgacggtcatctctccggtgactttaccgccagggttgagcgtcagtttagaaagctcacccacctccagtccctggtacatgagcggcgtagattccgctttcagaccgtctccgctgggcagctcaagtttaacgattacccctcgttggctgtgggctaaatctttatataagccgaacgtgtcatcctgggcggcgggtttggaattgtccggtgagtcaaacgcaatcgcgccattgaccagggccgcgaggctctccagtttcaccttcgcgccgctcaggcttagatcggcgtcaatgccggagacattccaaaaacggctgccttttttcaccagatcggtaaaccgtcgctcaatcagaacgtcaatcgtcacgccctgtttgttagggttaatcgaatagtcatacacccgtccgacagggattttacggaaatagaccagtgaaccgctattaagcgaaccgagatccggcgcattgagatgaatcatcagatcgccgttgctaagccggtatttaggctgtgtatccagggcgacgaaatgatctctgggcttgcctttacctggcatcataccgatgtaattcccgccgaccaacgcatccaggccggaaacgcccgccagcgaggctttgggcgtcaccagccagaattgcgtctcttcgcgcaacgcatcttccatatctgatttgatactgacgcgaacttcaattttgcgcagatctttgctcagactgacatcttccacggtgccgacttctactccctgataacgcacgggagtacggcccggtacgataccgtccgccgacataaaatcgatagtcacgctattgccgcgatcctggtagctatcccataccagccaccccgcgatcattagcgcgataagcggtagcagccagaaaggtgaaatacggcgtttggttttaatttgcgcttcagtcttcgaagcgggcgtttcctgactcatgtgcatcccaaagtaagcggctatccagccattccactgcaagaatagtcaaaattaccgctgcgccgaaataaaacgcagccggtcccatagtaaaagccagaatctgatcgcgattaatcagagacatggttaacgagataacgaaaagatccagcatcgaccaacggcctatccatgtcaccagacgcagcaacagaattcgcgtccgcagtccctgttggcatttaaaatggatactcaacagtagcgtaaacatcacgatgactttggtaaacggcaccaaaatactggcgataaaaacgacggcggcgacggcgatattgctgctggcaagcgacataatgcccgacaggatagtatcttcctgacgcccgccattaatgtagattaccgagataggcagcaggtttgccggcagcaaaaagacaatagacgccagcaaggccgcccaacacttctgtatgctctgttttctgcgtaaccgtagcggaatatgacaacgcgggcagcgtcctttcgcatccggatagccgctaaagtggcagccaagacagacgcgcaatctttcgtccgcacgttgagcagggcgctgcggataaaatcgttcccatagttgctccacattcagatgaatcatagtcagaatgctaagaaccaccaacgagacgaacgctaaaagcccgatgcccggctgcagaaaggcatagtcctgcactttgatagaggcaacgccaataccgaccagatagatgtccagcatcacccactctttcagtttttccagcatcagcaggactggacgcagattcatgccgaggaggctgccaaaccacaggtaagcaattgaaaaaaccagaataagcggcgcgcccaccacgcaaaagagcaccattgcggcggttaacggatcgccctgctgcgtcatttgccagatgccgtgcatcacattggcatcaatgcgtacgcccaacaggtagatatggagtaacggttcgctccaggcaaacggcatcaatagcagcatggttaccgccatcgcggtcagccgcgtcagcgaccagtcgcgcccatcgcgaattttggcctggcaacgaggacaataagcgctttgatgagcgctcatctccggcaagctgaacagcatgtcgcattcagggcagcgctggtagtggctgcgcggcagcgcttcgctaattgacctgatcgttagcttttttgttggcgtgacgtgtgaggtgttcagagccatgtatcgtgaatcaaagtgttagaataatgtaatcttaactcatgacaggaataatcttgagcaagaacgcatttaatgcttattttaatagcctgtgtttaggagtaagaccacgaagtgattatataatgagcaaaacagaactatacgcggcgttaaaccgcgattttcagtcgttaatggcaggtgaaaccagctttctggccacgctggcgaataccagcgcgctactgttcgaacgccttaccgaggtgaactgggcgggattttatctcctcgaaggcgatacgctggtgttggggccgtttcaggggcgaatcgcctgtgtgcggattccggttggtcgcggcgtgtgtggcgcagcggtagcgcagaataaggttcaacgtattgatgatgttcatgcgtttgacggccatattgcctgtgatgccgccagcaacgccgaaattgtgctgcctgtcacggttggcgaacggattatcggcgtgctggatatagatagcacagcgtttggccgttttaccgaagaagatgaacacggcctgcgtacgctggtcgcacagcttgaaaccgtgcttgcaacgacggattacaaaaaattctttgcgagcgttgcaggataatcaacggataacgtagcaattactgatggcgtcattataatgacgcctgttcatgcctgctgcttgttggctacgtccgttgtaatcaggaaatttcatggaaaatcaacctaagttgaatagcagtaaagaagttatcgcgtttctggccgagcgttttcctcactgttttagtgcggaaggcgaagctcgcccgctgaaaattggtatttttcaggatctggtagagcgagttgggggcgaaatgaacctcagcaaaacgcaacttcgttccgctttacgtctttatacttcaagctggcgttacctgtacggcgttaagccgggcgcaacgcgcgtcgaccttgatggcaatccgtgcggcgagctggaagaacagcatgtcgaacatgcgcgtaagcagcttgaagaagccaaagcccgtgttcaggcgcagcgcgcagagcagcaagcgaaaaaacgcgaagctgccgcggcggctggcgaaaaagaagacgcgccgcgacgcgagcgtaaacctcgcccggtagcgcgtcgtaaagaaggcgctgaacgtaaacctcgcgctgataaaccgacgacgaaagcgccgcgtgcgcctcgcgaagagaagcacacgccggtttctgatatttcagtattgaccgtagggcagtccctcaaggtgaaagcgggtaataatgcgatggatgccaccgtattagaaatcaccaaagatggtgtccgtgtacagctgaattcgggtatgtctttgattgtacgcgcagaacacctggtgttctgaaacggaggccaggcctggcatgaacactttttttaggcttaccgcgttagctggcctgcttgcattagcaggccagtccttcgccgtggaagatattacgcgtgccgatcaaattcccgtactaaaggaagagacgcaacatgcgacggtgagcgagcgcgtaacgtcgcgttttacccgctcccactatcgccagttcgatctggatgaggcattttcggcaaagatctttgatcgctatctgaatcttctcgactatagccacaacgttttgttggcgagcgatgtcgagcagtttgcgaaaaagaaaaccgtgttgggcgatgagctgcgcacgggtaagctggatgttttttacgatctttataacctggcgcaaaagcgccggtttgaacgttaccagtacgcgctaaaagtgctggaacggccaatggatttcaccggaaacgatacgtttaacctggaccgcagtaaagcgccctggccgaaagatgaggctgagctaaatgcgctgtgggatggtaaagtgaaattcgatgagctcagtctgaaactcaccggcaagagcgacaaagaaattcgcgaaacgctgacgcgtcgctacaaattcgctattcgccgcctggcgcagaccaacagtgaagatgtgttctcgctggcgatgaccgcttttgcgcgtgaaatcgacccgcatacgaattatctttctccccgcaataccgagcagtttaataccgaaatgagcctgtctctggaaggtatcggcgcggtgctgcaaatggatgacgattacactgtcattaactcattggtcgccggcggcccagcagcgaagagcaagtcgattagcgtcggcgatcgtatcgtcggcgtagggcaggccggaaaaccgatggtcgacgtcattggctggcgtcttgacgatgtggtggcgctgatcaaagggccaaaaggcagcaaggtccgactggaaatactgccggctggtaaagggacgaaaacgcgtatcatcacgctgacgcgtgaacggattcgtcttgaagatcgcgcggttaaaatgtcggtgaaaaccgtcggcaaggaaaaagttggcgtactggatattccaggcttctatgttggcttgaccgatgatgtcaaagttcagcttcagaagctggaaaaacagaatgttaacagcatcgttatcgatctgcgttcaaacggcggtggggcgctgacggaagccgtttcgctttccggtctgtttatcccttctggtccgatagttcaggtgcgcgacaataacggcaaagtgcgtgaggatagcgacaccgacggcgtggtctactacaaaggcccgctggtggtgctggtcgatcgtttcagtgcctcggcatcggaaatcttcgctgccgcgatgcaggattatggtcgcgcgctgattgtcggtgagccgaccttcggtaaagggacggtacagcaatatcgttcgctaaaccgaatttacgatcagatgcttcgcccggaatggcctgcgctgggttcggtgcagtacaccattcagaagttttaccgtgtcaacggcggtagtacgcagcgtaaaggggtcacgccggatatcatcatgccgactggcaatgaagagacggaaaccggagaaaaatttgaagataacgccttgccgtgggatagcattgatgcggcgaaatacgtgaaatcggacgatttggccccgtttggcccggaattattgaaagaacacaacgcgcgtatcgccaaagatcctgagtttcagtacatcatgaaggatattgcacgtttcaatgccatgaaggataagcgcaacatcgtctctctgaattatgcgcagcgtgagaaagagaacaatgaagaagacgctctgcgtctggcgcgtattaacgatcggtttaaacgtgagggtaaaccgttgctgaagaaactggacgatctgccaaaggattaccaggagccggacccgtaccttgatgaaacggtgaagattgctctggacctggcgcatcttgaaaaagaaaaaccagcggagcaggcggcagccaataagtaacgctaaacaggcacaaaaaattgtgcctgtttttttttaacaagcgcagaagtcgtcaggataatgctacaaaatgtaaagttgtgtttttctcgtgacttaccgcctggtgatgcttgaaaatagccataagacccatacgatgtgggtaatcgcatagtgcgctttgttaaattgaggttaaaagaaaattatgatgcgaatcgcgctcttcctgctgacgaacctggccgtgatggtcgttttcgggctggttctgagcctgacagggatacagtcgagcagcgtgcaaggcttgctgatcatggcgctgctgtttggttttggcggttcttttatttcattgctgatgtccaaatggatggcgttaaaatccgtaggaggggaagttattgaacagcctcgcaatgaaagagaacgctggttgatgaacaccgtagcaacgcaagcgcgccaggccggtatcgccatgccgcaggttgctatctaccatgcgccggacattaacgcgtttgcgacgggcgcacgccgtgacgcctcattggtcgctgtgagcaccggtttgttgcaaaacatgagccctgacgaagcggaagccgtcattgcgcatgaaatcagccatattgccaatggcgatatggtgacgatgacgttgattcagggggtggttaacaccttcgttatctttatttcgcgcattatcgcgcaaattgctgctggttttctgggcggcaaccgcgatgaaggcgaaggaagtaacggtaatccgctaatctatttcgccgttgcgacggtgctggaactggtcttcggtattctggcgagcatcatcaccatgtggttctcccgttaccgtgagtttcatgccgatgcgggatcggcgaagctggttggccgtgaaaaaatgattgccgcgttgcagcgcctgaaaaccagctacgagccgcaagaagcgaccagcatgatggcgttttgtattaacggtaaatcgaaatcgttaagcgagctgtttatgacgcacccaccgctggataaacgcattgaagcgctgcgtagcggtgagtacctgaaataataagcccactggcaagtatgaaaagcgcgtcgaatgacgcgctttttttacgcctgaacgcgtggttgcgtaatacgtaaaccgctcaccaccgccgcgagagtcgccaggatcgccgctgcgagcagagaaagatgcgtaccgctatcgccaaactggttcaacatcagcgctaccagcgcggcgccagtactttggcctaacagtcgcgccgtgcccagcatcccgctggcgccaccgctgcgctcacgcggcgcggaagtgataatggtgtgattattcggcgactggaacaggccaaaccctgcgccacaaaggatcatcggccagataatattcagatcggagggggaggctggcaacatgaccagcgcaaacaacccggctgccattatcaccattcccagcgcccccagcaaaccggcatgaagacgttctatcaggtatcccgccagcggcgccattaccatcgttgccagcggccagggcgtcaataacaggccggtttctacttcgctacggcccagcacggtttgcagataaaaaggtagcgagaccatggctaacatttgcgcgcagaacgagcaaattgacgtgccgatcgagagtgaaaaaagcggaatgcgtaacaagtcgatgggtaacaaagggacgggcaaagaaagctggcggcgcacgaagaaaaacccgaccacgaccagaacgagcagctctgcgccaatcaacgttagcgactgtccctgggcaaatccgctcaatgcggtaatcagcaggccaaatgtgagcgcattcattaccgcgctcggtaagtcaaagcgcggcttagtgtcatgggcgatgtttgctggtaaaaagcgtatggccagaattaacgcgatgatacctaacgggacattaatcagaaacagccatttccatgatgagatggacaaaatcgctgcggcgatcgtcggacccgcggcggaagagactgcgacgataaaagagttaattcccatgcctcgtcccagatgacgctgggggtagataagacgaatcagcgccgtgtttacgctcattagcgccgcgccgccaaatccctgcgcgatgcgcgccagcgtcagcatctgcagcgagtctgaaagcgcgcaaaacaatgatgaaagcagaaataccactaaaccacatttgtagatccggcgataaccaaacatgtcgcctaaaaaagacagggaaagcagtgagacgacaatggcgatttggtatgcattgacaatccagatagagctggcaggggaggcatgtaaatcagtcgcaatggttggcagcgcgacattagcgattgcgccatccagaaccgccatcgaaataccgataataatcgtcaggatagcgccgtatctctgcgggaggggcaggccatcggcccgtgttttttccataagtattttgtaataaggggagttatgagctgaataataatgttagcattaatactgagttgttatgtcgcagatttgtaacgaagtaagcaaagatggattgcgggcgacctggcgtgaaattataataaaaactcgttctgaattttataaaacgctcgtaatgaggtgataaatggcaaacgcagatctggataagcagcctgattctgtatcttctgtgctgaaagttttcggcattctgcaggcgctgggtgaagagcgtgaaatagggattaccgagctatcgcagcgcgtcatgatgtcgaaaagcaccgtttatcgctttttgcaaaccatgaaaactctgggctacgtggctcaggagggggagtctgaaaaatactctctgacgctaaagctgtttgagctgggcgcgcgagctttgcaaaatgttgatctcatccgcagtgcggacattcagatgcgcgaactgtctcgtctgacaaaagaaactatccatcttggcgcgctggatgaagacagcattgtctatatccataaaattgactctatgtacaatctgcggatgtactcacgtattgggcgtcgtaatccgctgtacagtacggccatcggtaaagtgcttctggcctggcgcgaccgtgatgaggttaagcagattctcgacggcgtagagtataagcaaagcacgggacgcacgattaccagcactgaagcgttgctgccgctgttggatgaagtgcgtgcgcaaggatacggtgaagataacgaagaacaggaagaaggattacgttgtatcggcgtaccggtatttgaccgttttggcgtagtcatcgcagggttaagcatttcgttcccgacgctgcgtttttcagaagaacgcctacaggaatatgtggctatgttacacgccgccgcgcgtaaaatttctgaacaaatgggttacaacgattatcccttctaagcaacgttattagcatgacgttaaaaaaaagcagctacgaaaaatgtagctgctttttttataacatcgggtgggatgaaatcgtaaaagtagataatatctgtcggcttatttaacggttattaaaatattatttaacagtacttatgaacaacagccaatataggggaattattggtgatagtttcactgtgaaattatttattgccgcttagccattatccaccacggtggcgatttttctgaaaatgggacagtcggaaaagccaataatgccgctgttggtatggagatattgcgccgtgctggtgccgcgtgcggtcaggtaatggcactgtaaacccagccccgcagcgttcactttacttcccaccaggatgccatagccgctcatcagcaggcctatccacaccagggcaaacaatacaattgcgcgaatgatcaaacgcattactacctcttttcttttttagttagaataagagtagcgtgtacattgattgaaacaagtgaatcattcctaaaaacatataatgccgctacagttactcctggttttagtaactcatgataatttagcgacataagatgtaagatcggagagtggagtgaaaaaatttcgatgggtcgttctcggcatcgtggtggtagtatgcctgttgctgtgggcgcaggtgtttaatatcatgtgcgatcaggatgtacaatttttcagcggtatttgcgccatcaataaatttattccctggtaaacgttttacaccagagatttccttcccgtgtagcagtggtagaatgacgtctctacattgaggtggtgaaatgaacgacgttttaaactctggtgcgttttctcttgcatctttaatagtatcaatggtggttctggtggtggggctggcgctctggttctttgtcaaccgggcaagttcccgtgccaacgagcagatagaactgctcgaagcgttgttggatcaacagaagcggcaaaacgcgttgttacgccgcctttgcgaagcaaacgaaccagaaaaagaagcggaacccgcaacagcggcaagcgaaccgaaagaggatgaggacatcattcgtctggttgctgaacgataatgcttaccggggcgcaaatggcgccagtgccatacgccccatttccccgtcggatctctccgcgttgccgtttgcaactgatactacagcatcaacaccttacctaatatatggctttatatgcaacatagttttatatgtataacaaatgggcatatggcatttttgtgataccgctcattctctattaaaagcgaaacgtttctctctctttatggattgtcattgtttgttcattattttaaggcattctgtaaagacgcagaacatcacaaaaagcggtgtcgaaaatcgcttttcttttctattattttgattaaaaggtgttttttatcattgtgacaatttatgcataactcagcataaaaagtgatatgaaaaatacagcttttaaatgtgatttgatgcactggaagaagcgaagttattgagctatggtagaaaaatggcttttcagcagtgacgttgtcaggagtccgtcagcgcgtgaggatatatctttcgcaattttgttgcataaacgtgctgtcaatttgtgaaggttctcgtaatttgtgcgacggatcgagacacgtttaaaaatggcttgccataattaacgttgtatgtgataacaggctttgggttaaacgaggtacagttctgtttatgtgtggcattttcagtaaagaagtcctgagtaaacacgttgacgttgaataccgcttctctgccgaaccttatattagtgcctcaagcagtaatgtctcagttttatctatgttatgcctacgggcaaagaaaacactctaaggaattttgcaaatggcaaagattaaaggtcaagttaagtggttcaacgaatccaaaggttttggcttcattactccggctgacggcagcaaagatgtgttcgtacacttctccgctatccagggcaatggtttcaaaactctggctgaaggccagaacgttgagttcgaaattcaggacggccagaaaggtccggctgctgttaacgtaacagctatctgatcgacaccactgatttgatgcgtttgtcgcgtcagcctcagatataaagcctcgctaaaagcggggctttttaattcaatatccttcaaaatgtgtctggatgcgctctcgttagcgatttgttgcaaaggcgcgatgttattagcattgttttttctggtttttccggccgtttcccgttaaatcaatcacctgaaaaatgattcggctggagatcaggtgaaaaagaaaagcgacggcgatacccgtaattttacgcccatacgttttgcactactttgcactgccattctgctcagtatggcattgttgttagggcgggtggcatggctgcaaattgttacgccgtcgaaactggtgaaacaagaagatatgcgctcgcttcgtgaagtgaccacggcctctccacgcggcatgatcaccgacagagaagggcggcccttagcggtgagcgttccggttaatgctgtctgggccgatccgaagactatcataagcaaaggcggcgttggctacaatgagcgctggcaggcgctggccagcgccctgcatctgtcgctcagtacgcttgcggaacgggtaaacagtaacccggcaggtcgttttatctacctcgcgcgccaggtttcaccccagcaagccgaatggatagataaactgaatctaccgggtattaacctgcgggaagagtcgcgccgtttttaccctgccggacacgtagcggccaatttgatcggctttaccaatatcgacgggcagggaatagaaggtattgaaaagagctttaacgcgcaactgacgggaaaaccgggctcccgactggtgcgtaaagataaatttggtcacgttattgagaacattacggaagtgaatccggttcctgctcatgaacttcagcttagcattgatgaacgtctgcaaacggttaccgaagatgcgctggataacgccgtcatctggaacaaagcggaatccggcgctgccgtattgattaacatcccaacgggtgaaattctctcgatggcgagctacccggatttcaacccgaacaaccgtgaaggcgcgcagttggacgattttcgtaaccgcgcgattagcgatactttcgaacccggttctactgtgaagccattggtcattatgactgcgttacagcagggcatcgtgcagccggacagcgttatcgatacccatccttttactctcgatggacaccgtatccgcgacgtcggttactatccggaactgacattaaccggcattttgcaaaaatccagcgataccggcgtttctcacctttctctggcgatgccggtgcagaaattaatggatacttataaaagctttggtttcggcgtgcctaccggactgggtctcaccggagagagcagcgggttattaccgaaacgccgttactggagtgatttagatcgcgctaccttcgcttttggctatggattaatggtgacgccgctgcaactggcgcatgtttatgccacgattggcagctttggtatctaccgtccgttatcgatcaccaaagttgatccgcccgtgatcggcacgcgggtaatgccggaagaactggtgcacgaggtggaacatatgatggagagcgtcgcgttgcctggcggcggcggaacaaaagccgcagtaagagactaccgtattgcggtcaaaaccgggacggcgaaaaaaattggcgatgatggtaaatacgtcgataaatatgtggcatataccgcaggcgtcgcgccggcaagtaaccccagatttgcgctggtggtggtgattaataatccgcaaaacggggcttattatggcggcgcggtatctgcgcccgtattcagccagatcatgggcgatgtgctgcggctggaaaatgttgagccagacggtatgccagccgattcagatcaccttctggtgatgcatggcagccacgttgcggttccgggctcgtaaaggattttcccggggcgcaattcgcgttacacttgcgccctttagcgccccagtccggagttgtcatgtcgtttacctgtccgctttgccatcagccgcttacgcagattaataacagcgttatatgtccacagcgccatcagtttgatgtggcgaaagagggctacatcaatctgctgccggtacagcataaacgttcgcgcgatccgggcgacagcgccgaaatgatgcaggcgaggagagcgtttcttgatgcgggccattatcagccgctgcgcgatgcggtgattaacctgttgcgcgagcggctggatcagtcggccacggcgattctggatatcggctgcggcgaggggtattacactcatgcttttgccgaggcgttgccgggagtcaccacgtttggactggacgttgctaaaacggcgatcaaagcggcggcgaagcgctattcgcaggtgaagttttgtgtggcgtcaagccatcgactgccctttgccgatgcgtcaatggatgcggtgatcagaatctacgccccgtgtaaggcgcaggaattggcgcgtgtggtgaaacctggtggttgggtcgttaccgccacgccagggccgcatcatctgatggaactaaaagggctcatttatgatgaggtgcgtttacatgcgccgtataccgagcagctcgacggattcacattgcagcagagtacccgccttgcttatcacatgcagctcaccgccgaagcggctgtagcactgttgcaaatgacgccatttgcctggcgcgccaggccagacgtgtgggaacaactggccgccagcgccggacttagctgccagacggatttcaaccttcatctctggcagcgtaaccgttaaccgtgaaaatgcgtccagaggatctggacgccaattcctatcagtacgaccccgccgagaatttcagcacgcttacccagcattgggccgataaagcgaccgatcatcattccgagggtggacatgataagcgtggcgcaaccgatagctaatgcggtagcgatgatgtttacctgcaaaaacgccagaccgacgccaaccgccatcgcatcgaggctggtcgcgatagccgtcgtgactaatagccaaaagctgtggcggcgtaacggtgtttcatcttcatcactaccgccgcggataccttcgatgatcatgcgtccgcccagaaagatcagcagaacaaaggctatccagtggttccattccagaacgaatttactcgccaatatccccagcccccagccgattaacggggtcagcgtttcaaccgcgccaaagataaggccggtacgcaacgcttctgagaatttgggtttatgtagggtggcgcctttgccaattgatgccgcgaaagcatccatcgacataccgaaagcgagaagaacagtagcagtaaagtgcatgacaacgtcctgaccggggtatccattaaacacatcactgcccccagcaaacatgcatgtcgccattctgtgacgaaatacacagcagttgatgcgcctatggtctcgcctgaccagcggcggctggtccgtacgcgccacgttttgcaacgagtatgttgacgcgtacatttccggagtctggaaatcggctactccccaattgacggcgcaacattaacatatttttagaatataaaacaacagcgataaaatattatttgccttctaattgaaaacgattttcatttagatttattcatcaataaaacgttaaattaaataacaattggtcaatagaaaatatagccttagctatattatgattcgaaataaaattcgaaaaacatagttgaggctatatcttaagctattgattttcaataagaagtttatatattttttccagattgtcgatattgcgtacacggataagcaagcgtcgttgttctaattgcatcaccagtacgccgtcttccgataaattcatctctttaatacggttatattctatccagacattggcgaagaaaaagccacgttgtttaaagatgatccgtggcgtgcggatccagaatatataaaaccccattaacgccagcgcgcttaataaccatgtggtcatctgcgctccgtggctggttacgttgttataaataaggatggcgaccagcccaacgaagataacgctgtctacgcgaccgcggcggagcagggctatagaaagcagagtggggccattgcgacggggcatgatgaactgatcgtagagagcgtaagccaataatgcggcaataaagagaatcagcaccaggtccgtgatagtcatttatcctccagagaaataaaaaaacggggccgtttggccccggtagtgtacaacagccttactgacccagcagtcctacggagtagccggcgataccgatgacgaagaagcccacgataatccacagcgggttaactttcttacgcagcagccacatacaggcaaaggtcaacagtagcggaaccagacccggcatcagctggtcgagaatggtttgcacggtggtaacgcgtgtctgaccatcctgaccggtgatggtggagaccaccagcgggatattcacatgcgtccacttgttaaccaatgcccccatgacaaacaggccgaggattgacgccccctcagtcagtttttgcaggaagccgccgcccatatctttaacgatatcgacgcctttgcggtagccataagccacgccataataacgggtcgccagacgcaccaggttaaacaggatgaaaaacagcagcggaccaagcaggctgccgctcattgcaatacctgcgcccagcgccgcgaatactggacggacggtaccccagaagatagggtcgccgacgcctgccagcggtcccatcagaccgactttgataccgttgatagcgccatcgtcaatctctgcgccattcgcacgcttttcttccattgccagcgttacgcccagtaccggcgccgcaacgtaaggatgggtgttaaagaactccaggtgacgtttaatcgcctgtttacgcgcgtcattattctccggatacaggcgacgaatcgctggcaccatagagaagcagaagcccagcgcttgcatacgttcgaagttccatgacccctggaacaggttagaacgaagaaatacgccgcgaatatcgctcggagtgagttttttctcggtggtagttttagtcatatcaaccatttcgctcacctgttagtccagttcgttgtcgagatcgttattgccagcagccgttgcaggcgcgcccgctacacggttgtatttcgggctcagctggatgtaaagaatagccatcactgcgccgatgacacccagtgcgaccaggttgaagtttgtgaaagccgcggtgacgaaaccgaggtagaagaacggcatcaggtagcctgcgcgcatcatgttgataaccatcgcataaccaaccacgacgatcatgccgccggcgatgttcagaccgcccgtgacgacttcaggaatcgcattcagcattccctgtacttcgctggtgcctacggagatggcaacgataaccgccgggatagcgatacgcattgcctgcaggaacagagaagaaacgtgcagccaggagagcgccgtcaggttgccgttttcagccgccttgtccgccgcgtgctggaatgccacggtgatggtacgaacgataatggtcagtacctggcctgccgccgccagcggaatcgccagcgcgataccggcgccaatgctttgatgcccggcgatgaccagaacggtagagatgatggacgccagtgcggcatcaggcgcaacggcagcaccgatgttcatccagcccagagcgatcatttccagagtaccgccgatgataataccggttttcatgtcccccagaacggcgccgattaaggtacaggcgatcagcggacggtggaactgaaattcatcaagtaccgactccatacccgcgatacatgcgacgatgaacaccagcacaatctgaagagtggtaatctccattgtacttctcctattgctatcttaagtgtgaaagctaattaaatgccggcggttatttcgccactttggcaattaaatccatcattttcagtttcggatcggtggaaactttacgcacctcaagctcgatgccgcgctcgttgagctttttaaaggcttcgatatccttttcatcgacggaaacggcgttgttcacctgcgttttaccttgacgataggccataccgccaatgttcacggaggtgactttcacgccgccctcaacgatgcgctcgacgtcggtaggattggtaaacagaagcatcacgcgttcgccggcgtatttcgggttattgtagacgcgaatcatcttcgcgacgtcaaccacatgcgccgtaacgcccggcggcgcaacttgcgtcagcagcgttttacgtacggtatccgccgcgacttcatcgctcacaacaataatacggctgacattggtctctttggtccagcgggtagcgacctgaccgtgaatgagacggtcatcaatacgggcaagcccgataaccatataatcattcgggcccatcggttttgccggcgtggccgcttttggcgcggcggcgactggcgctggcgcggctttttctaccggtttcgctttcagcgcttttacgccttcacgaccggtttctaccgccagtgcgaccagctcgtcaaagcttggatcgtcgtcacgagccataaacgtttcgaccagcatcgggatgttgacgccggcaataacttcatagcgctctttatcgacgacaatgcggctggcagcattaaacggactgcctccccatgtatcaacgagaaatagcacgcctttactggtatcgagtttagccaactgagcgttgtacttttcgatcagcgtttcggcattttcgcctggaacgaaatcgatccagccgacgttttcctgctcgcctaacagcatttcggctgttttaagtaactgctctgcagcccaaccatgtgtgcctataacaatagcaatggtcacttgctacctcctttattattgtcaacacatcaacttgacagatgtattttttgaatcgccgtccgcaagcgaatcgattcagatgagggttacaacgaaaaacgcatgattttcgtgaattattttagatatcgaaaaaaatattttgtgtgatggagatccgtaattttgttttcgataatgagaaatttcgaagtgtaaaatatcccggttacatctctttgcaaaggaaggtaaatctttgccaaaaaccagttgtctctgttatgtttagcttccgtttaattagaatggggtatagggcagcagcccgttgtatggatcgtcaccgacgtcatttcactctttggccgttttgcgcctgtcaatctggcatatcttgccatagccttactttgtttattgcgttaccgcctgcatcctttgagatgttgtgggcgccgtttagtcattccttaagcaggagcttgtcatggaattattaatggatccctcaatttgggtgggtttactcacgctcgtcgtcctggaaattgttctgggtatcgataacctggtctttatcgcgatcctcgccgataaattgccgccaaagcagcgtgacaaagcgcgtcttatcgggctctcgctggcgctgattatgcgtctggcgctgctgtccattatttcgtggctggtgaccttaacaaagccgctctttaccgtctgggattttaccttctccggccgcgatttaattatgctgctgggcggtatattcctgctgtttaaagcgaccaccgagctgcatgaacgtctggaaaaccgcgagcatgacaccggacacggtaaaggctatgcgagcttctgggtggtagtcacgcagattgtcatcctggatgcggtcttctcgctggacgccgtgattacggcggtaggtatggtaaaccatctgccggttatgatggcggcggtggtgattgcgatggcggtgatgctactggcgtcaaaaccgctgacccgttttgtcaaccagcatccgacggtggtggtgctctgtctgagtttcctgctgatgatcggcttgagcctggtggcggaagggttcggtttccatattccgaaaggctacctgtacgcggcaattggtttctcgatcgttatcgaggtgtttaaccagattgcgcgccgcaactttattcgtcatcagtccacgttgccgctgcgcgcgcgtactgcggacgctatcctgcgtctgatgggcggtaaacgccaggcgagtacgcaacatgaaacggatagcccggccgcgatatcggtgtcggaaggcgccttcgccgaagaagaacgctacatgattaacggcgtactgactctggcgtcgcgctccctgcgcggcattatgacgccgcgaggcgaaattagttgggtggatgcgaatctcagcgtagctgaaatccgtcagcagttactctcttctccgcatagcctgttcccggtatgtcggggcgagctggatgaaattatcggtatcgttcgggcgaaagagttgctggtggcgctggaagagggcgcggacgttgcggctatcgccgcgtcttccccggcgatagtggtgccggaaacgcttgatcctatcaatctgttaggcgttttgcgccgcgcgcgcggcagtttcgttatcgtcactaacgagttcggcgtggtgcaggggctggttacgccgctggatgtgctggaagcgattgccggtgagttcccggatgccgatgaaacgctggaaatcgttgccgatgccgagggctggatagtgaagggcggcaccgatctccatgcgctacagcaggcgctggaagttgatcatctggtgaacgaagagggcgatattgcgacggtcgcggggttagtgatcgccgctaatggccatattcctcgtgtaggcgatgtcattgatgttccgcccctgcggatcaccattgtcgaggccaacgactatcgtgtcgatctggttcgaattgttaaagaacagcctgcccacgacgaagaggaatgacgtcacacgcaggaatcaagtctatagatgcggcatcgcggacataatctgtccgttatgccgggcgggcggcggcgcgctgcccgccagccactgtggaaattcgctaatgggcatcggcttcgcatagagatagccctgtaacatttgcacgccatgctggcgcaaatgctgtgcctgcgtctggttttcgaccccttccgccaccagttcaatattcagtctttgccccagagcgataataatatcggtcaccgttgaattgaccgcatcggtaccgatggcggcggtgaaggatttatcgattttcaaaatatccggccgcagtttttccagccaggagagcgagctgtttcctgtgccaaaatcatcgatggctaacttcacgcctttacgatgcagctcgcgcatcaggcggtaatcaacgtcaagcaacgcgtcgcgttccgtgagctccagcaccagttgctgaacaggttccgcactaaaccagtactgattaagatccttgagaagcacgccgtgtcggaaatggcttgccgccacattgatgccgatatgaaactgatggttgatggggaagtagtgccgctgccgaatggtttccgcaatcacatagcgggtcagcggcgctatcaggttatgttcctcggcgataggaataaaaacatccggtgagatccagccctggcgcgggttgttccagcgtaacaggatctcaacgccggtacactgctgcgtgcgggcattaagcaacggctgacaaaatagctcaaactcccgttcggcaagggccagattaatttcccaggaaaagctcattctgctggccgttgccagccaggcgatataaccgatcaacaggctaagcaatacggccagcggtaactgcgtcgggagatgtttgaacgccagtacgcctgccgacggcccgctgacgctgatagtaaaagggaaatgtcgcgatgaaagctggtaacgctcttcatctttttttaattccggaagagtatcgaccacgccccgaccatataacaggtgccgtttgccgaccgtcaggctggcgctggtaatttgcggctgctgcggctcaagtagcatagtcgtcagcaagtcaatattcacaatttccatcacgccatcctggccatcggcagaggcgggataccactgaatgaggatcgggcttcccttgagtaacgattggtctgtggaaagtagcagcagatcgccgactgcgggaagatcgggctgaagctggcgtatgggagtattacgggcgccaaaaatgcttgagcaatagagaattccctctttcaccagcccgatagaacgaacggtttgcagacgggcggcttgcttacgcaacggcagatgcgcggtcgcgcacggaagctcaagcaaggggagcagtacgtttcgtccgacctggagaggatgcaaaacattatccagcgcatcaacggcatgattcgcgaatgcaaccgtgcgatggtgatttaagttccgctccgaaataaatcggatgctcagcgtaagaatgagcgtgaccagtgcacaaatcgtgcaaacaatgaaacgattacggcgataatgattgatgatccgttgtgctgtttgcatgcgggccgcccaataagcgttggcgacaaaagccaaccgcgacacagcaagtgtagtggggaaacgtggagtcgacgaggaagagataaaaatttcgcccatccgtagcagatgggcgaagggaggggaaacggcgtttaatcacactggactttaatagccagcccgccgcgcgacgtttcgcggtattttgcgttcatgtcttttccggtctcgtacatcgtttcgatgactttatccaacgagacgcgcggcgcgctggttcgacgcatggccatacgcgcagcgttgatcgctttaaccgaagcaatggcgttacgctcgatacacggcacctgcacctgaccggcaaccgggtcgcaggtcagccccaggttatgctccatgccgatttcagcggcaacgcaaacctgctccgggctggcgcccaacagttcagcaaggcctgccgccgccatcgaacaggcgaccccgacttcgccctgacagccgacttccgcgccggaaatagacgcgttcatcttatacagcgcgccaatagcgcctgccgccaggaagtagcgggtgtaaatatccgggctgactgattcaataaaatggtcgtagtaagccagtaccgcaggaacgataccgcacgcgccgttggttggcgccgtcacgacgcggccgcctgcggcgttctcttcgttcaccgccagagcaaacatgttcacccagtcaatgacgttcatcggatcgttggaaagcttatcgctggaaaccagcatacgacgcagcgcagaggcgcgacgcggtacgcgcagcggccccggcagcacgccttcggtattcataccacgatcaatacaggcctgcatggtctgccagacgtgaccgaaatactcttcaatctctttcttgctatgcagcgccagttcgttttgcatcaccatgccggagagtgaaaggccggtactgttgcaatactccagcatttctttcgccgatttaaacggataaggtacagtaacctcattcgtcgcttcctggccgaaatgcgcttcatcaacgataaagccgccgccgatggaatagtacgtcttgctataaatgaccgtgtcgtcatgccaggcgtggatctgcatcccgttttcatgcagcggcaaattgccgttgtgaaaacgcattccgtcatctttcgggaagtcgacttcgtgacgtccctgggccagtaacagacgctcgcgcgtttcgacgtcgcgaataaaaccggggatactatcaatatccacggtagcgggttcattacccgccagacccataataatggcgatatcggtatggtgacctttccccgtcagcgacagcgagccgtagacatcgacagcgacgcgggtaacgttatccagtaatcctttttcgaccaggtcatcgacgaactgtttaccggccttcatcgggccaacagtgtgggaagaggagggaccaatccctaccttaaacatgtcgaataggctaatcacgataatactcctgacagggcaaccggggcttccggttacgatgttataactgcgcatagtgtaagagggaacgctggcatcagcttaactattcacatgaattaaactaatgaataaccgcgtttttactaatattgcgacagtaatctcaagtcgtgtcttgcgcgcgtaaagttaagtatatacacgttgcccttcaggctgcctctttgggggaggcgattgttaccaccttgaggcaacgtgaatggcgttgtgtacagtcagggctttacgccgatttgcagcgccagctcacgaagaatgtttgcggtcatgccccagacgaaataatgctcataccaggagagccatacgcggtgcgaattgccgcgacggtaaacatcaagcgggtgatatcgacccagttgcaacgcttgcgccagcggcatttcaaacaccgcagacacttcatcttcactggcgcgccaggggagatttggcggaataatgccgaccaccggggtgacctgaaaaccggtcacgctgtctaccggcggtaaaacgccaatcacttccacggcttgcggcgggatggcgacttcctcctgcgcttcgcgaagcgctgcggcgataagcgaagcatcggtactgtccacggccccgccgggaaaggcgacctgtccggcgtgtttgcgcaaatgaatagcccgctgggtcaacagcagccccggctgggggcggcgaaccacagggatcagtacggcggcctgacgttgatttaacgtttcatgagtcatctgcgggcgcaaaagctgaaagcgcgataagaaatgatcgagcgtcagacggctggtatccacgtattagttctccagtgggtgcaggatacgattaactttatcaaaagtttcctgatattccgcttcttccttgctatcggccacgataccgccgccggctgagcaatagagttggccctgcgttgccgtgacggtgcggatagtaatactggtatccatcttgccgcagaaactcagataaccgatgctaccgcaccaggcgttgcgtcgctgcggctccagttcgtcgataatttccatcgcccgcactttaggcgcgccggtaatggagccgccggggaaagccgcgcgcagcaggtcggtagcatgaagcgagtccggtaaacgggcggtaatggtgctaaccagatggtgaacggcaggaaatggttcgacgacgaacagttccggcactttcaccgaacccggcacggcgacccggccaatgtcgttacgcatcaaatcgacgatcatcaaattttcagcgcgatctttcattgagttggccagtttctgcgcctgctgacgatccgcctgcggatcgttaagccgtgggagcgtacctttgatcgggcgcgtctgaatatgaccattctccagttggataaaacgctcgggagaaaggctcaatatggcgccgtcatgtaaacgaagaaaggcgctgaacggggcgcgattggcgcggttaaggtgttcgaaagcctgccactcatcaccctcgtagctcgcctgaaaacgctgggaaagattgacctgatagcagtccccgctgtgcagccaggcctgcacctgacgaaacttttcgccatactcgcaacgcgtcatattggattgccaggccgaggtaagcctgaagggcgtgcgggtcggcgcgtgctggctggtgagccagcgatatcgggcgtctgcatcgtgatagcttatcagcgacaccacctgtttttggtgatcgacaatcagcgcccagtcgtaaaggccaatcgccatatcgggtaaagcgatatcgcgcgcagcagtatcgggcagaatttcgaaacgccgccctaaatcataaccaaacagacccagcgcgccgccctgaaagggtaagtcagggtcaggctgaggatgaaaaggcagcgcctccagttgagtctgcaaaacgtgtaacggatcgtcgaaagtgacggtagtcgtgcgcgcagtacataccgtggtttcctgcgcgcgcgtggtcagtgtggtgacaggatcggcgaccagaatatcaaaacggttatagggatgaatagcatcacctgaatgcagcagcatcgcccagggcaaatgatttacgggcgcaaaatagtgttcagcggcgtccggacgccagggtaaggtgataacagtgggagataacgtcttcatcattcctgactcgttacaacactactggcttaccgccgggtagcgtgaaataattagcgctaacaatttagcaggagttaatcatgtttgcaggtttaccttcactcagtcatgaacaacagcaaaaagccgtagaacgtatccaggaattgatgtcgcaaggtatgagcagcggagaagcgattgcccaggtggcgggcgaacttcgcgccaaccataccggcgaacggatagtggcgcgttttgaggatgaagacgaataaccggcttataccgccgcgacaatcttaatctcaactttatatttcgggttcatcaacccggcctgtacggtacagcgtaccggcgcatggcctgcgacgacccacgcatcccacgccttattcatggcggcaaaatccgctttatcgctcaggaaaatagtggcatccagaatacgtgacttactggagccctgtttttccagcaccgcatcaatttgcgccagagtattcgccgtttgctcaaaagcatcggcgtccaggttttccggcacgccggtataccacagcgtattattgtagatcaccacgtctgaccaacgatcttcggcatcaatacgcacgatagacattacttattcctcatttgcttttcatttgaatggttcaagactgccacaatgtggcgtcgccgtcacctctgtaactggcgtaagcctttctaccctgacataatccctgtgcaaattaacagggggcagtgtgacggacgattttgcagcagatggccaactggccaaagcgataaccggctttaaaccgcgcgaaccacagcgacaaatggcggttgccgtaacacaagcgattgaaaatgcgcagcctttggttgttgaagccggcaccggaaccgggaagacctatgcttacctcgctccggcgttgcgcgccgggaaaaaagtcattatttcgaccgggtcgaaagcgttgcaggatcaactctacagccgcgatctgccgacggtagcaaaagcgttggcgtttaccggtaagacggccctgttgaaaggacgttcaaactacctctgcctggagcgtctggaacaacaagcgctggcgggcggcgatttaccggtacaaacgttaagcgacgtgatattgctgcgctcctggtcaaatcagacgcgggatggcgatatcagcacctgcgtcagcgtggcggaggattcccaggcctggccgctggtcaccagtaccaacgacaactgccttggcagcgattgcccgctctacaaagagtgctttgtggtgaaagcgcgtaaaaaggcgatggacgcggatgtggtgattgtaaaccaccacctttttcttgcggatatggtggttaaagagagcgggtttggcgaacttatccctcaggctgaagtaatgatcttcgatgaagcccaccaactgcctgacatcgccagccagtatttcggacaatcgctctccagccgtcagttactggatttagcaaaagacatcaccatcgcctaccggacggaactgaaagacactcaacagttgcaaaaatgcgccgatcgccttgcccagagcgcccaggattttcgtctgcaactgggggagcccggctaccggggaaatttgcgtgaactgttagccgactcgcgtatccaacgggcatttttactgctggatgatacgctggagctttgttacgacgtggcgaagctgtcgctgggccgttcggcgctgctggatgcggcttttgaacgcgccacgctataccgttcacggctgaaacgcttaaaagagatcaatcagccgggatacagctactggtatgagtgcacctcgcgccatttcaccctggcgctgacgccgctcacagtggcggacaaattcaaagaggtgatggaacagaaacccggtagctggatttttacctcagccacgttatcggtaaatgatgatcttcaccactttaccgcccgtctgggaattgaacaggcagaatccatgctgctgcccagcccattcgactatacgcgccaggcgttactctgcgtaccgcgtaacctaccgcaaaccaaccagcccggcgcggcgcgacagttggcggctatgctcaggccgattattgaagccaataacgggcgatgttttatgctgtgcacctcacacgccatgatgcgcgatctggcggagcagtttcgcgccaccatgacgctgccggtattgttgcaaggggaaaccagtaaaggccaactgttacagcaatttgttagcgccggcaacgcgctgctcgtcgccaccagcagcttctgggaaggggtggacgtgcgcggcgatacgttatctttggtgattatcgacaaattgccgtttacttccccggacgacccgttgttaaaagcgcgaatggaagactgtcgtttgcgcggtggcgatccgtttgatgaggttcaactgcccgatgcggtgattacgctgaagcagggggtggggcggctaattcgcgatgcggacgatcgcggggtgttagtgatttgtgataaccggctggtgatgcggccctatggcgccacgtttctcgccagcctgcctcctgcgccgcgcacgcgtgatatcgcccgtgccgttcgctttcttgcgattccatccgccgagtaatttgttacggagtatggtaagatgcgcgctattttattgatctaagcacgaaacctcatgcgaattctggctatcgataccgccacagaggcctgttctgtcgccctgtggaacaacggtactatcaatgctcactttgagctttgtccacgagaacacactcaacgtatcctgcccatggtgcaggagattctggccgccagcggcgtctcgctcaatgagatagatgcgctggcgtttgggcgcggtccgggcagctttaccggcgtgcgtatcggcattgggattgcgcaagggctggcgttaggggcaaatctgccgatgatcggtgtttcgacgcttgccacgatggcgcagggcgcgtggcgtaaaaccggcgcgacccgcgtactcgccgcgattgacgcgcggatgggcgaagtgtactgggcggaataccagcgtgatgcgcagggcgtctggcagggcgaagagacggaagcggtgctgaaaccggaacgggtcggtgagcggttgaaacagctttccggcgagtgggcgacggtaggaacgggttggtccgcatggcccgatctggcgaaggagtgcggcctgacgcttcatgatggggaggtgtcgctcccggcagcggaagatatgttgcccatcgccagtcaaaagctggcggcaggagagaccgttgccgtggaacatgccgagccggtttatttgcgtaacgaagtggcgtggaagaaacttcccggcaaagaatgactctcactactattaccccccatactttatgctgtggggtggaatagaggtcgagaaaaaggagtcgcatcatggcggttcaaaaacggttaataaaaggggcgctggcgtgcgcttttgcgcttatgctgagcggttgcgtgactatcccggatgccattaaaggttcgagtccgacgccgcagcaggatttggtgcgggtgatgaatgcgccgcagctctatatcgggcaagaggcgcgttttggcggcaaagttgtggcggtacaaaatcagcagggaaaaacccggcttgaaatcgcgaccgtaccgctcgacagcggcgcgcgtcctgttctgggcgaagcctcgcgcggcagaatttttgccgatgtgaacggttttctggacccggtggacttccgtggccagttagttaccgttgtcggcccgataaccggcacggttgacggtaaaatcggcaatacgccgtataaatttatgctgatgcaggctaccggctataaacgctggcatcttgttcagcaggtcgtcatgcctccacagccgatcgatccgtggttttacggcggacgcgcctggccttatggctatggcggttggggatggtataaccctggacccgcagaggttcagacgatagtaacagagtaaccctttgttttatcaataaaagaaacagcggctggtccgctgtttctgcattcatagagacataataaaaataaatagtgacgcgcttcgcaacctttcagttgcgtaattaataaactggtacgctgagttaatataatgttaacgacttgtttattaactggggttgtgatgacgacgaacactcattttagaggtgatgcattgaagaaggtttggcttaaccgttatcctgctgatgttccggcggagatcaaccctgaccgttatcaatccctggttgaactgtttgaacatgcggcgacgcgctatgccgatcagcctgcgttcgtcaatatgggggaggtaatgaccttccgtaaattagaagaacgtagtcgggcatttgcggcttatttacaacaagggctgggactcaaaaaaggcgaccgtgtggcgctgatgatgccaaacctgttgcagtatcctgtcgcgctatttggtattttacgcgctggcatgattgtggtgaacgttaacccgctgtacacgccgcgcgaacttgagcatcagcttaacgatagcggcgcggcggcaatcattattgtttctaactttgcccatacgctggaaaaagtagtcgagaaaacgtcggtacagcacgttattctgacgcggatgggcgaccagctttctaccgccaaaggtacggttgttaactttgtcgtgaaatacatcaagcgtctggtgccaaaataccacttgccagatgcgatctcgtttcgcagcgcgctacagcatggctaccgtatgcagtatgtcaaacccgaggttgtcgctgaagatctggctttcctgcaatataccggcggtacgacgggcgtggcgaaaggcgcgatgttgacccaccgcaatatgctggcgaatctggagcaggtgaaagcgacctatgggccgctgctgcacccggggaaagagctggtagtgaccgcgctgccgctgtatcacatttttgccttaaccatgaactgtctgctttttatcgagctgggtgggcaaaacctgctgattaccaatccgcgtgatatccccggcctggtcaaggagctggcgaaatatccatttacggcgatgactggcgttaatacgctattcaacgccctgctcaataataaagagtttcaacagctggatttttcttcgctgcatctgtcagccggcggcgggatgccggtgcaaaacgtcgttgcggaacgttgggtaaagctgaccgggcaatacctgctggaaggctacgggctgaccgagtgcgccccgctggtgagcgtcaacccgcatgatattgattatcacagcggcagtatcggcctgcctgtaccgtcaacagaagccaaactggtggatgacgatgataacgaagtcgcgccgggtgaggccggagagctttgcgtgaaaggccctcaggttatgctgggatactggcagcgtcctgacgcgacggatgaaatcattaaagatggttggctgcatacgggcgatattgcggttatggatgaagatggctttctgcggattgtcgatcgtaagaaagatatgattctggtttctggtttcaacgtttatccaaacgaaattgaagatgtggtgatgcagcattctggcgtgcaggaagtcgcggcggttggcgtgccttccggtagtagcggcgaagcggtgaagctttttgtggttaagaaagatccggcattgactgacgatgcgttgatcaccttctgccgtcgccatctgaccggatataaggtgcccaaacaggtagagtttcgcgaggaattaccaaaatctaacgttgggaaaattttacgacgagaactgcgtgacgaagcccgtggcaaagtagacaataaagcctgagcgttaagtcagctaacgagagacgccggttaagccggcgttttttttggcgcgaaccaaagagaacacgatttgaattaccaaatgattgaaacggacgatgcgctggcgagcctgtgtgaggctgtccgcgcatgtccggctattgctttagatacggaatttgtccgtacccgcacctattacccgcagttaggattgatccagttatttgacggggcaaatgtcgccctgatcgatccgctcggcatcagcgactggtcgccgttaaaagcggtgttgcgcgatacgggaatcaccaaatttctgcacgcgggtagcgaagatctggaagtatttctgaatgcgtttggcgaactgccggagcccctgattgatacgcaaattctggcggcgttttgcgggcgtccgctgtcgtgggggtttgcggcgatggtagaagagtatacgggcgtggcgctggataaaagcgagtctcgtaccgactggttagcccggcctttaagcgaacgtcagtgtgaatacgcggcggcggatgtctggtatctgttaccgatcgccaaaaagctgatgattgaaactgaagccgcaggatggctgcctgccgcgcttgatgaatgccgattgatgcagcagcgtcgtcaggagattcaggcgccggaagaagcatggcgggatatcaccaatgcctggcaactgcgtactcgccagttagcctgtctgcaacttttagctgactggcggatacgtaaggcgcgtgagcgcgatatggcggtgaactttgttgtgcgtgaagaaaacctgtgggcggtcgcgcgttatatgccgggcagtctcggtgagctggatagcctggggctttccggcagcgagattcgttttcacggcaagacgttgatatcgctggtggcgaaagcacaggcgttaccggaagaggcattgccggaacccctgttgaatctgatggacatgccgggctatcgcaaagcgtttaaggccatcaaagcgctggtggcggaggtgagcgcgtcgcatcacgtcagcggcgagctactggcatcgcgtcggcagattaatcagttgcttaactggcactggaaattaaaaccgcaaaatgggcaaccggaattgatttccggctggcgcgccgaactgatggcggagaagttaactcttctgttgcaggagtatccgcgttaacggcggtaattgccgggaaaacggccagtgaaataaatgtccgtattcggaataatgtaaaaaaataaaaaaggcagattcttctgccttttttaatccaggaattttcccataaaagagcttattttgactcttcggcttccggcagcgttacgttaagttcaaggatggagatatcaccatctttttgctcaagctggacggtaaccatttccggatcgatttgtacgtatttacaaatgacctcaagaatatctttacgtaactgcggtaaataatgcggttcggcatcgctacggcgacgttccgcgacaatgatttgcaaccgctcttttgcaatattagcggtactctttttccgcgagagaaaaaaatccagtaatgccataatttatcctccgaacaggcgtttgaggaaacctttcttctcttcttcaatgaagcggaaaggacgttcttctcccaacagacgatctacggtatctgcataggctttacccgcatccgcagtggcgtcaagaatcaccggttcaccctggttagatgcgcgcagtacggattgatcttccgggatcaccccgacgagtttaatacgcagaatctccagtacatcttccatgctgagcatgtcgcctttattgacgcggcctggattgtagcgcgtcaacaggagatgttctttaatcggttcttcgccattttctgcgcgacgagatttcgatgccagaatacccagaatacggtccgagtcacggacagaagagacttccgggttagtcgtgatgatcgcttcatcggcaaaatagagcgccatcagcgccccggtttcgatacccgccggcgagtcgcaaacgatgaactcaaagtccatcgctttcagtgagtccagtaccttagcgacgccttcgcgcgttagcgcgtctttatcccgggtctgcgacgccggaagaatgaagagattttcagtacgcttatctttgatcagcgcctgattcagtgtcgcatcgccctgaatgacgtttacaaaatcgtaaacgacacgacgttcgcaccccataatcagatcgaggttacgcagtccgatatcaaaatcaatgacgacagttttctttcccttctgggccaaacctgtagcgatggccgcgctggaggtggtcttgccaacgccccctttacccgaagtaacaacaataatgcgtgccataaaaattccttgttaaaaagggatcaattcaacggttgaactgtcaaagcgttgtctgctaaacgcaggcgcgccgctttgccataaaattctgccgggattttatcactcagccagtaaacacctgcgatagagaccagttctgccgtcagatgggtacaaaaaatttgcgcttcccgatcgccgctcgctcctgccagcgcgcgacctctcatcatgccatagacatggatattgccgtcagcgataagctctgcgccagcgctgacgtgacttgtaacaatcagatcacattgtggagcataaatgcgctgaccggaacgaaccggaacatcaattaatcgcgtttttgtgatgggattggcgttttgcggcggttcgctgggcgttgccggctcaacgggcgcaggccgaaccgctttctctttaccttcagtcagtaaaggaagacccatccgatcgatttctactttcaggctggtgtctttacagccgctcacgccgataatgcgtaagccggttgaggtcacgatcttatgcagttccggccagtttaccgggctttcaagaccgctaacgttaataacgacaggggcgtgttttaaaaacgcaggagcctgcgctattttgtcttctaacgcctgacgaataacctctggttccgcttcatgcaaatgaaccactgataaggtgaagctactgcctttaagctcgattggcgtgtttgacatcctggccttactcaatttgctatttatcatctccgatacggagtgatattccgaagtccagaaggcatgttatagtcagtattatattgaggcaagtcaccatcccgttaattcagagtaaaagtatgttttgtgtgatctatagaagtagcaagcgcgatcaaacctatttgtatgtcgaaaaaaaagacgatttttcgcgggtgcctgaagcattgatgaaaggattcggtcagccgcagttagcgatgatgctgccgcttgatggacgtaaaaaattagtcaatgccgagctcgaaaaagtaaaacaggcgttaagcgagcagggctattatttacaattgccgccgccgccggaagatttgctgaaacaacatctttcttcggtaggacaaaatacgtcgcccgctgaccgttaaacggtattcggcgccgcgcctgaattccatcatgatcttaggggaaaatatgtatcaacatcgtaactggcaaggcgccttgcttgattacccggtaagtaaagtggtctgcgtgggcagtaattacgcaaatcacatcaaggagatgggcagcgcgacgccggaagaacccgtgctttttatcaagccggaaaccgcattgtgtgatattcgccagccgctggcgattccggcggatatgggggctgttcatcatgaagttgagcttgctgtgctgattggcgcaacgctccgccaggcgaccgaagatcatgtacgtaaagcgatagccggttatggcgtggcgcttgatttaaccctgcgcgatattcaagggaaaatgaaaaaggccggacagccctgggaaaaagccaaaggttttgataacgcatgtccgatttcaggcttcatccctgtcgcggccttctgcggcgatccgcaaaatacggttatcggacttaacgttaatggcgaggttcgccagcaagggtcgaccgcggatatgattcatcctattgtgccccttatcgcctatatgagccgctattttacgctcaaagccggggacgtggtgctaaccggcacgccggcaggcgtggggccattattaagcggcgatgagctggacattcgttttaatggcgaaacgttgtctacccgcgttctgtaaaatctgcttgccgccttcagcggcggtaaaacttgcatctgcaggccagactggttataaggtgcagctttagtgcaatggcggatactttaatgagcgatacacctttctggcaacgtaaaaccctggatgaaatgaccgatgccgagtgggagtcgctgtgcgatggctgcggtcaatgctgcctgcataagctgatggatgaagatacagatgaaatctacttcaccaacgtggcgtgcaggcaattaaatatcaaaacgtgccagtgccgtcattatgagcgccgttttgaatttgaacccgactgtatcaaactcactcgcgaaaacttgccagactttgaatggttgccgatgacctgcgcctaccgtttgttggcggaaggtaagcccttgccgacgtggcatccgctgctgactggatcgaaagctgctatgcatggcgagcgaatttctgtccgtcatatcgcggttaaagaatctgaagtacgggactggcaggatcatattttaaataaaccgtcgtgggcagaataagtcttcggcaaaacggctgattgtttacaattctttaatttacgctgggcggcccctgaagccaggaattgcgtgcaaattccgtcacctggcgttatcactgccttctcttcttccctgacgcgccttgtcgctgcgctcgcgcacgtatggcggcgactctatactttcaaagcagtatatcgctgcctatcctgaggagttaccccatgaataaccaaccgttgcgcgtttcaaaggatcagcccaggaagcctgataagacacccgaagacgaaggaaaaaatccaaagaaaaaccaaaagtagtgctgtagggtatctttaataactatggttcgttggaggctttatgtctgaacgtcctgatttagtcgatccattaccagaggatgagccgcttcctggtgaaaatattccggatacaccagagggagacgatcctctcgacccggatacccagaatgaggttgaagatcctcgtagatagcgtcttgtgctattaaccaaccgcctgatgcaccgtctgtgccaggcggttttttacatcttctaaagcgaaacatcctgataatcctcagaaagatagcctataattttttgtacgttaaaatagtagcgcgtccatgacgacactgtcttattgcgcttagccgtttgcgagttcaaaggaggaaatcaatgaacagcgaagagttgacacataaagcagaagaggaaatcgcggcactcattagcaaaaaggtcgccgaactacggaagaaaaccgggcaagaggtttccgaaatagagttcgcgccgcgagaaacgatgaaagggcttgagggataccacgttaaaattaaactactctagcgtttaattagcgccattaatcacctggctactgggcgggacgccgcccagtggtgactggtttaccgatgtcaggcttttttctgttgatacatttcctcgccctgatggtcttcctctacccaaaaatgaatgttgaaccgcgcatcatcgctcagctctacccgatgccagtattgcggcggactggtggcgaattgcccggcattaatcaccactttcacttcgggttctgtcgcggtttcattcgcaaagccatagtaggtcacggtgccttccatcacgcagagttgtccgaaaacgcctgccgctgtgttgtgatgagagagcagtgccgccggaacattctctttggtgaaaaagggggtagagcgtttaactttccagtttgccgggatgcgtaagtgggacataagacatctccctgatgtggtaattaaaagatgtatttaatatacaccttttaattactggcaaacaacgcttcgggcaaaaaaaacgctcccgaaggagcgtgtgtatcaacgaccgaacaggtcgcgttttttaggcttaaatgcctgggctatgacgacggctatcgccaccacaaggtaagcggcaaagatccccaacagccattgcggcatctccagcgttaaaaacgaccactggcgttcggcgcaatcaccggatgccacaaacacctgcggcagccatttacccaacggcaaccagtctggaaagcgcgccataaagtcacaggtcatgaacggcgagggatgcaactgaatcatcgtatgttcatacgccagttgtagaccccgccatgcgctgtaaatccagataaccatggccacgtatcgcagcggtgttttcggcgctatagcgccgaccagacccgcgcccatcacgccaaacagggcgcaacgttcgtaaatacatagcacgcaaggtttaagtaacatgacgtgctggaaccacagcgccaccatttccagcgccagggcggtaaacgccatcagtaaccatgcgccccgaccccgtgagcactggtttaaaaatcgcaacataataatttccctgcaacatgcgtagagaccgcagtgtaaaccaattcaattcgtgcgccactagcgggaaatgaaataatgtgtaattggataattatcaggcaaaaatcggagccgggcggtgtattgcccggccaaacgttacgaaagcgttgctaaccatcctgcctgagtcatccattcggtggccggcgcaagagtgaattcgacgcacagtagccctatcagggtcagtacgatagtgtacggtaacgccatccagaccatacggccataggagagacggattaacggcgccagcgcggaggtcagcaggaataagaatgccgcctgaccatttggcgtcgctaccgatggcaggttagtaccggtattgatggccacggctagcagctcaaactgttttaagctgattgcgccgttttccattgccgccttcgcttcgttgatataaatggtgccgacaaagacgttatctgagatggaagacaacaggccgttaaagagatagaacagcgttagctgcgcgtgttcagaggcttgcaagacgaactgaataatcggcgcgaaaagatgttgatcgataataaccgccacaatggagaagaaaacggttaacagcgcagtaaacggcagcgactcggtaaacgctttgccgatggcgtgttcatcggttacacccgttaacgcggtggccagaataatgaccgacagaccaatcagtcccacctccgcgagatggagggcgagggcggtaaccagccagacgccaataaccgcctggactattagtttaattttatcctggcgggtgcgcttcttacggctttgatcgtcgaattgctgtaaaacatcgcggactttttcgggcaacgtttcgccatagccaaaccagcgcattttctcgaccagcatacaggttaacagtccacataccagtaccgggacggtgacaggcgacatccgcaaaaagaagtcgccgaaatgccagccagccgctttagcgatgatcaggttttgcggctccccgaccatggtcatgacgccgcccagcgccgtccccacgcctgcatgcatcatcagactacgcaagaatccgcggaattgctccagcaccgttttgtaatgcggatcgatatggctgtcgtccagcatatcgttctcttcgccgcgcgatgaggccacacgatggtaaatcccgtaaaaaccgacggcgacgctgatcaccaccgcaacgacggtaagcgcgtcaaggaaagccgacaagaacgcggcggcgacgcaaaaggccagcgacagaaccatcttcgagcggatactgagtaacagacgggtaaaaataaacagcaataactgcttcataaagtagatgcctgccaccataaacatcagcagcagcaagacttccaggttggcggcaacctcttcacgtacatgggcggcgctggtcataccgatgataacggcttcaatggccagtaacccgccgggcagcagggggtaacactttaacgccatcgccagagtgaagataaactctgccaccagcagccaaccggcaataaagggattagctaagaaaatgaatgggttaacaattaaaaagacaagtagtgccagtttgtaccagtcgggcgactggcctaaaaagttgcgccacatggcgcgaccccatgagatctccatgaaatttttccttacctagaaaaatgaaatagcgtttttatgtttaaacacagagagtagcgagcgcgacgaatgcaagcaagtccttaacgatattggcaggcgatatcagaaatggtgccttgatcccctttttcttcattgcgtccgctatcaggtgttacgcccgtctggtatgatgagtgcaactatgttttgctgtgtaatggaaatctcactatggtcattaaggcgcagagcccggcgggtttcgcggaagagtatattattgaaagtatctggaataaccgctttcctcctggcacgatcttaccggcagaacgagaactctccgaactgatcggcgtgacgcgcacgacattacgcgaggtgttacagcggctggcgcgagatggctggctgaccattcagcatggcaaaccgacaaaggttaataatttttgggaaacgtcagggctgaatatccttgaaacgctggcccgccttgatcatgaaagcgttccgcaactgatcgacaatttgttgtcggtgcgtaccaatatttctactatctttattcgtaccgcgttgcgtcaacacccggataaggcgcaggaagtgctggccactgcccacgaagtggccgaccatgccgatgcattcgccgatctggactataacatctttcgtggtctggcattcgcctccggcaatcctatttacggcttgatcctgaacggcatgaaagggttatacacccgcattggtcgccactatttcgccaatccggaagcgcgcagtctggcactgggtttctatcataaattatcgtcgttatgcgagcagggcgcgcacgaccaggtgtatgaaacggtgcgacgttacgggcatgacagcggcgagatttggcatcggatgcagaaaaatctgcccggcgatttagcgattcagggacgataatcccgcgatgcccggtaggcgcaaacactaccgggcagcatctcgattacagcgtgttcatgcgcggcggacaacgctccagcagttctacgctgccatcctcattttgttgctccagcatcacatcaaagccccataaccgatgcacatgtttcagcacctctttgcggcctttatccagcggtgcgcggttatgcgggatataacgcaacgtcagcgatctgtcgccgcgtaaatccacattccagacctgaatattcggctccaggttgctcaggttatactgtgacgacagttttgatcgaatctcccgataaccttcttcgttatgaatggcggagatctccagataattatgcctgtcatcatcaagtaccgtgaagaaacggaaatcacgcatcacttttggcgacaggaactggctgataaagctttcatctttaaaatcgcgcatggcgaagtgcagcgtttccagccagtcggaaccggcaatatccggaaaccagtatttatcttcatccgtgggcgactgacaaatacgtttgatatcctggaacatggcaaagccgagcgcataggggttaattccgctataccaggggctattatagggcggctgaaatacgacattggtatggctgtgtaaaaactccagcataaagcgttccgtcactttgccttcatcatacagatggttcaggatggtgtagtgccagaaggtcgcccagccctcgttcatgacctgcgtctgtttctgcggataaaaatactggctgactttacgcacgatgcgcagaatttcgcgctgccacggctcgagcaacggggcgtttttctccataaaatagagcaggttttcctgcggttcagcgggaaagcggcgtgcttcggcgacagttttttcttcctcgcgttttggcagcgtgcgccacagcatattcacctggctttgtagatactcttcccggcttttttgtcgcgctttctcttcctgcaacgagattttctgcgggcgcttatagcgatcgacgccgtaattcatcagcgcgtggcaggagtcgagcagtttttctacttcatccactccgtagcgttcttcacagcgggtaatgtaattccgggcgaaaatcaggtagtcgacgatagagctggcatccgtccagctccggaagagataattatttttaaaaaaggagttgtggccgtaacaggcgtgcgccatgaccagcgcttgcatggtgatggtgttctcttccatcaggtaggcaatgcagggattagagttgatcacaatttcataagccagtccttgttgaccatgcttatacagacgttccgtctcaatgaactttttgccaaacgaccagtgcggatagttgatcggcatcccgacgctggagtaggcgtccatcatctgttcggaagtgatgacttcaatttggtgcgggtaagtatccagttggtagagcttcgccacgcggtctatctctgccagatagacatccagcagatcaaatgtccagtcgggtccatcgctcaaacgtgtggtgtccttgttcatggaatcaatcattgccattcgcgcaccctcattgttggcgacgctctctgtatggagcgcctcctttcaagcatagaacaccatgttaaaaaacgacttgatcgtgaaaacttttctttgcgatttcctccacattgaacggcaaaaaatcgggtattggcatcattttatgctgtatagccatgccgcgtagcaggagatcccaaaccagtgggatcgcttgtctttagggtatatgtgaagcacgtcaccataaaaaagtcatatgttgaataatattttcatctgggttatcaagatgtaatcagaagattgttcttttactattaacggagtggctatgcgagttgtcatcctggggagtggcgtagttggcgtgaccagcgcctggtacttgagtcaggcggggcatgatgtcaccgtcatcgatcgcgaatccggcccggcgcaagaaaccagcgcggcgaatgccggacaaatttcaccgggatatgcggcgccctgggcggcccctggcgtaccgctgaaggcgataaaatggatgttccagcgccatgcgccgctggcggtgcgtctggatggcaccccatttcaactgaagtggatgtggcaaatgctgcgtaactgcgatacccggcattatatggaaaataaaggccgcatggtgcgcctggcggaatatagtcgcgactgtctgaaaacgctacgcgccgcgaccggtatcgaatatgaaggccgccaggggggaacgctacaactcttccgcaccgcgcaacagtatgagaacgccacccgtgatatcgccgtgctggaagatgccggggtgccgtatcagctcctggaatccagccgactggcggaagttgaacccgctctggctgaggttgcgcataaattaaccggcggactgcgcttaccgaatgatgaaaccggggactgtcagctctttacccagcgtctggcgcgcatggcggagcaggcgggcgtaacctttcgctttaatactcccgtggaaaaattactgtacgaaaatgatcagatttacggcgtgaaatgcgccgatgagatcattaaagcagatgcgtatgttatggcgtttggatcgtattcgacggcgatgcttaaaggcattgttgatatcccggtgtatccgctgaaaggctattcattaaccatcccaatcgtcgagccagacggcgcgccggtatcgacgattcttgatgaaacctacaaaatcgctattacgcgttttgataagcgtattcgcgtggggggaatggcggaaatcgtgggctttaataccgacttactgcaaccgcgccgcgagacgctggagatggttgtgcgcgatctctttccgcgcggcggtcatattgagcaggccacattctggaccggcctgcgccccatgacgccggacggcacgccggtagtaggacgcacccgttataaaaatctgtggcttaatactggacacggcaccttaggctggacgatggcctgcggttcaggccagttgttaagcgatatcttgtcgggtcgcacgccagcgataccctacgacgatctgagcgtggcgcgataccgttccgattttacgcccacccccccgcaacgtttgcatagcgcgcataactgataaaggaagtgaaatgacccgccctatacaggccagccttgatttacaggtaatgaaacaaaatttggctattgtgcgccgggcggccccagaggcgcgcgtctggtcggtagtgaaagccaacgcctacggccacggtattgaacgcgtctggagcgcgctgggcgccacagatggtttcgctatgctcaaccttgaagaggcgattaccctgcgtgagcgcgggtggaaagggccgatattgatgctggaggggtttttccatgcgcaagacctggaggcgtatgacacttatcggctgaccacctgcatccacagtaactggcagttgaaagcgctgcaaaatgcgcggcttaacgcgccgctggatatctatgtcaaagtcaacagcggcatgaaccgactcggttttcagcctgagcgggcgcagaccgtctggcagcaattgcgggcaatgcgcaatgtcggtgaaatgaccctgatgtcacattttgctcaggccgatcatccggaaggtatcggggaggcgatgaggcgtattgcgctggcgacagaaggccttcaatgttcatactcgttatcaaattcggcagcgacgctgtggcatccccaggcgcattatgactgggtcaggccgggcattattttgtacggcgcgtcgccgtcaggacagtggcgggatattgccgataccggactaaaacccgtgatgacgctgagtagcgaaattattggcgtgcagacgctgaacgcgggtgaaagggtaggctatggcggagggtattctgtgactcaggaacaacgcattggcatcgtcgcggcgggttatgccgatggctatccacgccatgcaccgaccgggacgcctgtgctggtggacggtatccgtaccagaacagtaggcaccgtttcaatggatatgctggcggtggatttgacgccgtgtccgcaggcgggaatcggcacgccggttgaattatggggcaaagaaattaaggtcgatgatgtcgcctctgcggcaggcacgctgggctatgagctactgtgcgccgtagcgccgcgcgtgccatttgtgacaacgtaacctaactcagactaaggcgtcgaccggtccacctgggggcgggtcgacgttgccaggcgaccttattctgcttcgtcttcggcgacgcgtaccccaatcttgcgtaccacgttatcttctttttcagctaccgtccaaatcatgccgccaaactccacctgatcgccgacgaccggcgcagcgcccagcagctgctgtatgatttcacccagagtttgttgtttatcccggtattccgttccttcttccagcccgtagataagcgccacgtcggcgaatttcgcattcgcttcgaggataaaatcgccaaagaaacgctgatctaacgaaaccggcggcgactggctaaacaatttgcccagcgctggcagatcgcgctcccggccaatcacgcagagtacgtcgccttcctgcaggcgagtgctacccgtggggtgaaacagttcattattgcgaaatagcgcggcaatgcgggtttcgttcggcatatgcaggtcgcgcaacgccgcgccgacgcaccatttgtcggcgctcaactgataaatgaattgctcccacggattatcaggatggatgtcaagccccacgcgcgatactggccagccaaccggaggcacgaccactttagctctcttcgccgcccatgacagcgatgttccctgcaggagcagcgacaccagtaccacaaagaaagcgacattaaagaacaggcgagcgttttcaagcccggccatcatcgggaaaacggcgagaataatcggcaccgcgccgcgcagtccaacccaactgatgaaaatgcgctcccgaagattgaagccgcgaaatggcagcaggccggtaaacaccgacagtgggcgggcgaagaaaatcatccagatggagagaataagcgcagggacggcaatcggccacagatcggaaggcgtcaccaacagccccaggaccaggaacatcgcgatctgcgccagccaggccagtccgtcaaagttttgcaggatgccgtaacggttgcgaatcgggcggtttcctaacaggaatccgcacaaatagaccgcgagaatgccgctgccttcaagcgcggtcgtcaaagcaaaaatcagaataccgccgctgagcgccagcatcggatacaagccgctgggcagagaaatacggttgatcatctgctgtagcaggtaaccgccgcccaggccaaaaacaataccgagaccgaactgttggataatatggacggcaaacatccagtccaggccggtttcatgcttctggatcatctcaattaatgtaatggtcagaaaaacggccatcgggtcgttacttcccgattcgatctccagcgtggagcctacacgttcgtttagccctttgccgccaagcagagaaaagaccgctgcggcgtcagtggaaccgactatcgcgccgataagcagaccttcgataagatccagatgaaacagccaggcggccatcatacctgttaaccccgacgtgattagtacgccgagcgtcgccagcgacagcgcggggcccagcgctacccggaaagagctggcctgggtgcgcatgccgccatcgagtaaaataatcgccagcgccaggttactgaccatataagcgaaaggataattatcgaaaggaataccgccaatgccatccacacccgctaacatcccaatggcgagaaaaatgaccagaatcgggatacccagtcgcgatgagaatgaacttaacaggatactgctggttacaaggatggaacctaaaataaatagactaataattgttgcagcatccaacgttttatatctcctgactcacacgacttcgtattatttaacattaacataataacggccagggcagcgttttacttagcctgtcggggactttttttacaattgcagcgtaggatgaccagataaagtgagttgagtcccctggcgcgtatttttaagcgtcgcgtttgccccgatagggagcgttaccgtacgctgttcatgcccgaagtcgagaccggtaatcagcggaacggacagacgggaacgtaaaaacgcgtagacgctctccagagaatagccggcgtcatactcgttgggcgccgcgccgctaaagctgccgagaacgatggcgctctggcggtttaaaattccggcgtactccagttgcaaaagcatacgctccacccggaaaggatgctcattgacatcttccagcactaaaattcctttatcgatagtcggcatccagggcgtaccgataagggaaatcaacatcgccagatttccgccccataaggtgccctgtacgtcgcactgagggccgtcgccttgccactctacggtaaattgcgccttgcgtagcgccagccagaaatgttgctcggtgaacgtattcagcgtttcggcgccaaaatttgccgccagcataggaccgctaaaggtgatgacattggcctgcgccaggagtccagcctgaatcgccgtaaaatcgctatgaccgcaaatcagtaagggatcgcgctgttgccgggaggcgagcgcctgccagtcgatacgatccaacaagcggctggcgccatagccgccgcgaaccggcatgacgattgtatccggcgacgttagcgaggccagcgaattaacatcggccagccgttccgcgtccgtaccggcaaaacgctgaaagcggcgacgaatcacctcgtcattctccacctgatgacccgcgtcagtcaggcgctgaacgccgcgtaacgcggcctgttggttaatacagtagcccgacggggcgattaaatgaaacagagacatggtaattccttgctgacaatagaatgcaaatgtatatcatgccgcatatattaggcgatgtccctcgttgtgcgacgtttctggatgcgcaccagggaggcaacctaagtgcctggccggggcggtatgacctcttcggcagataagttacggctataaggatagatgacgtgaaattaagatggtttgcttttttggtagtaatactcgctggctgtagctcaaaacaggattacaggaatccgccgtggaatgccgaagtgcctgtaaagcgtgcgatgcagtggatgcccatcagtgaaaaagccggggcggcatggggggttgatccgcatttaatcaccgcgattatcgccattgaatccggcggcaaccctaacgcggttagtaagtccaatgcgattggcctgatgcagttaaaggcgtcgacctccgggcgcgacgtttaccgtcgtatgggctggcgtggcgaaccgaccaccagcgagctgaaaaaccctgagcgtaacatctcaatgggcgcggcgtatttgagcattctggaaaatgggccgctggccggcatcaaagatccgcaggtgatgcaatatgcgctggtcgtctcttatgctaacggcgcaggcgcgttattgcgtactttttcatccgacaggaagaaggcgatagaaaaaattaacgatctggatgcggacgagttttttgaacatgttgttgataatcatcccgcgccgcaggcgccgcgctatatctggaagcttcagcaggcgctggacgccatgtagtttagcgtgaagattattctcgcactttattcgctctttctcgggcctcgcgctcaagcgaaaaaataatccgctgcaactcccgctctaccgccgggctgacgttaaggaaacgaaagctcaggcggggagtggtgatcgtttcatttttcccatcaatcaccttacgctcgctgatggcgataagctgggcgtcaacgtgaaaaataccccatggccccatgttcagttcaacctgcgaaaagcgcgcgccttcgattagtccgtcggggatggcggattccagtagcgcgcccatgccgcccagggaaagatcaaacaggcgaaaacgtaacgtacgggtgtccggtagcgtggtgacgccgtaataaggcggatacagcggcgcgccaatacgaaaatactcccggcgctggacaaaccacagtgacgacggcaggggcgtgataaaggccggcagccgctgatattcgcctgtaacgagttgcggcaacgtgaactcgacttttgcgccctgtgtttctgcgataatggctacctgcccggcacgtaatacggcgctattttcatattcctggctgccgtaatccacgatgagtttttccgggtctaccgccaaaattttactaatgaattgaccatgcgcccatgaaatacgcagtggaacctgatttttatttaaatcccgtagcacgcctaatatcgctaatggattttttttcaggaactgctcattgtaaccactcacacgaaataacccctgatacgcagactatcgttgggttatcggcatcggtagaaagaacttaatagcgataaataaatttttatgtccgcgagataaatcagtgttcagaaatgcgacgctcgactttgcctatacttaaaacgtttttactggaaagagggttcgcaaatgggaattatcgcctggattgtttttggtttgattgccggcgttatcgccaaattgcttatgccggggcgcgatggcgggggatttatcctgacctgtattctcggtattgtcggggcggtcgttggcggatggctggcgacgatgtttggtattggcggcagtatcagcggctttaatctgcacagtttcctggtcgccgtggtgggcgcgattatggtgctggtgattttccgccttctgcgacgcggctaaccgctgcagaacgtgtaagcgttgacccggtcagcgccgggtcaacctactataaacacgcgttactgcgtcgctgcagacggcgtttttgtcggcgttgcgcttaacgatgccggacgagtagacggtacgctatcgcacggtttttcctgcggacaaatcagatcgagcattttcagcgtcacgccgttggtccagccaaagccgtcctgaagtggatattcgccgccgccaccgccggttccggtgctgctgacgtcatatttttcgaccagttttttctcgcgatcgtaggtgtgctgcacattggttaaaaagcgccaggtgacttccattgccacgtcatcctgcccataattttgcaatccttcggcagcgacccattgtaacggcgcccagccgtttggcgcatcccattgctgtccgcttttaaccgaggtggtagccagcccgccaggctgtagcagatgcgcctgggccgccgccgccactttcgcggcgcgatctttcgcggcggcgtttacatagagcgggaacagcgcggcagcggtgagttggtcacggattttattgttcttcagatcgtagtcggcataccaaccctctttgttattccacagatgcatttcaatggctttttgccgcgcgttggccagcgcgtcatagtgcgaggctttggcccgatcgcccgccgcagcgctggcgcgggcgagggttttctccagctgatacagcagagcgttaagatcgacagggacaatagtggtggtacgaatggtactgagctgctgcggattatccatccagcgggagctgaaatcccagccggaggcggcagcagaacggaggtcccgatagatctccgttgccgggcggttggggttgcttttgacggtagcgatatcttcaacccaggattcagggcggggcgtatcccgatcgtcccagtagcggttgagaacgctaccgtcttccagtttgacgacgcgttggttttgttgccctggctgcaatgtctcaacgccctccatccagtaggcgtactctttttgcagttgcggcaggtattctttcagcgcatcgtcaccttcatgttgcgccagtaactcaaccataaacgcaaagaaaggcggctgcgaacgactcaggtagtaggtacggttgccgttaggaatatgcccccaggcgtcaatttcgtaaccaaagttcgctaccatatccgccaccttatcccagtgcccgctttccgccagccccagcatcgtaaaatagctgtcccagtagtaaatctctctgaatcgcccacccggtacgacataggattcaggcaacggcaagagcgagtcccacttttcgacgtttttagttgaacgggtcagcaccggccacaggccatcaatatgttcacgcaatgactgcccggcaggcgggacatatttttcacccgctttcggcagggtgaagttaacatcaacaaaatgacgcaaatcgaagccggactggttccgctgcatacgataatccgcaagaatcatgagcggatcgctattaggtatggcgtcagcaaaggttttctgatcggggaagagttttgcattctggacatcattaaagagcgggccaagcaaaatatccggcggctgcggagtttcagtgtcggaagacgggtctgcggcagtcgccgaaaacgatgcaaacgtcagcagcgtccctgccagcgccagttttatggctttctgtagtagaacagaacggcgaatctctgggggtatcatcaagttatctccttagcggtgagccaaagccaacggcatttaccatgacaaaaccttagtctacgatgaccagatacgcgtgattgaaccgctattttgcgaacaaacagacattttattgagacagaatttatcggcgcgcgcgtggaaaacgggggatacagacaaaaaatccacgccgggacgtggattttagcgcaataacttgtagccttaacccggatagataccgcgatctttacgggccaacagaatgcgctcacaggcgacaatataggctgcggtgcgcagagaacaggatttctcagccgctttctcccagacatggacgatcgcgtcggtcatgattttgtccatgcgcgcgttgatctcttcttcgctccagaagaagctggccatatcttgtacccattcgaagtagctgacggttacgccgcctgcgttacagaccacgtcaggcaccacaaggataccacggctggccagaacatcatcagcatccggataggtcgggccgttagccccttccagcaccagcttacacgtcagggcttccgcgcgctgacgagttatctgaccttcaagcgccgccgggatcagaatatccatctccagacgccagaacgcatcgctggcgatagtttccgcgcccgggaaaccggctatctgtttgtgttctgtctgccatgccgtgagcgccttcatgtcaataccggtggcgttaaacagggtcgcggtatgatcctgaatcgccacgacacgggcgccagcgcctgcaaacagacgcgcggcttcgctgccgacgttaccaaaaccctgaaccgcaacgcgagcgccttcaacagcaatattcgcccgacgtgcggcttccagcccgctgacaaaaacgccgcgccccgtcgctttttcacggcccagcgaaccgccaagatggataggcttaccggtgacgacgccagtgaccgtcgtgccatgattcatggaatacgtatccatcatccaggccatcactttaccgttggtgccgacatccggcgcaggaatatctttctgcggcccgatgataatgccgatctcgctggtatagcggcgggtcaaacgctccagttcaccttccgacagcgagaacggatcgacgcggataccgcctttagcgccgccgtatggcaggttcagcgcggcacatttgatggtcatccatgctgacagggccatcacttcattgagatcaacgtcaggatggtagcgaacaccgcctttacccggacctcgggagaggttgtgctgcacgcgatatccttcgaaatgacgaatagtgccatcatccatttgtaccggaatatcgacgatcagagcgcgttttgggtggcgcagagtatccacccagggggataactcgcccagataaggggccacacgctcgatttgttgcaggtaggtattccaggcagatgtgctgctatctgaagcgtaagataacttatccatgataaaccttagtgataaaagtaatatgttctttaattgaccgtggtacatagtagatcacaccatgtagcgataaatttaacacttttttaaacaattaactcagatcaaaaatggcaggcagttggattttcgttatgattttggatgggaagtggttaactatccgctataagaggtgatatattgctaattatgcaattaattgcttaaatatgcgaaatatgtgcaaggtggctatttgtcataattatgacgcacctctaaaagtaaacattatgataacgacatgtatcaatgttatgtcgtcctgtcggcggggaaacgtcttcgccaggcgcgtataaagataaaaataaccggagtcagacggcgctggccccggtttacctctttattgttgacgcgactcaagccataccagcgccagtgtcgacagtgagcacatcagcagaatgccgacaaaccacagtaaataccacatcgctcccgctccctaataaagttcatgatcgttgcggcggagggtctccaggttgatacgccccaacattttgtaatagctccacagcgtatagagcagtacgattggcagaaaaatcagcacaatcaccagcatgatttcgagcgtcatctggctggaggtgctgtcccacaccgtcaggctggagagaggactaacactcgacggcatcacaaaaggaaatagcgttatgccggcggtaaagatgacgcaggcctgggtcagggaagcgaacagaaatccacgaatagtctgaccgcgaaggcaggcatagaaagccagaatcggcaggatcataccgagcaacgggatgatgagcagtagcggcgagcgtataaagtggttcatccatgcgccagggagtatcgccacgccttttaagagcggattggaagggccgttggcatcctgcgtgagcaagacaaagccatcaacgccggcccacagccagtaaccggccagcaggaagcagatcacgatcagcagcgcgctgtggcgggtggccgacagagcccgttgacgaataacgccctccgttttcaactgtaaccagacgcctccttgcataatcaccaacgacaggctcaataatccacacagtagggcaaagggcgagagtaactgccagaaggtgccaaaatagtcaacatgaagctgcggcgtgaaggcaaacggcacgcctaaaaacaggttgccgaacgcgatgccgaatacgactgggggaaccaggctgccgataaccagaccggtatcccacagcgcgcgccagcgggcattggcgattttaccccgataatcaaaggccagcgggcgaaagaagagggcacacagcaccaggatcatcgccacataaaaaccggaaaacgcggcggcatagacccgtggccaggcggcgaataatgccccgcccgcgagaatcaaccatacctggtttccttcccagtgggcgcccacgctattgatcaatacccggcgttcgtcatcgttgcgcgctatcagcgggagcaggcaaccgacacccatatcaaacccgtcagttaccataaatgccaccaggatgacgccgatcagcagccaccaaatgaaccgcaacgtttcataatccaacatgattgtctcctttatccctgttgttgcgcttgttgttgatgttgcatggcgctcggcccaagacgcgcgtacttctgcatcagatagacttccgcgattaaaaacagggtgtaaagtccgaggataagccccattgagaaggccaactggcccggcgtcagcgcggagtgagcgtaccaggtcggcagaatgtcctgaatcgcccagggctgacggccaaactccgtcataaaccaaccggcttcaatggcaatccacggtaacggcaggctccacagcgtcatacgcaatacccagcgatgctggtcgatacgcattcgcagcgtctgtatcaacgcaatcaacatcaccactaacagcagcgaaccgcagccgaccataatacggaaactccagaacaccggcgccacctgaggaatagcgccacgctgggccgcacgatactgctccggcgtcacatggttcatatccggggcatatttcgccagcagaatgccgtaccccagatcgccctcaacggcgtgaaacgcattcagtacctgtggcgagcgattgccttgcgctatctcctgcatgagcagccaggcctcccggccacgcttcaggcgcggcagagcgtcgtccatcaggttttttaaccccggaactggcgtatccagcgaatgggtggccagaatacccagcagagcagggatcttcacggcaaatgcattacgctcctgttcctgctgcggccaggcaatcagatgaaacggcgcgggcgcgggttcggtttgccattcgccttccatcgccgccagtttcaccggctgaatttgggcgacctcgtaggccgaactgtcgcccagttgcagggttcccagaatggccagggtgccgaatactgagccgatagcaaacgagcgcaaggccacctcacgctcgcggccacgtagcagataccaggcgctgatagacataataaacatggcgccggtgacataaccggacatgacggtatggacgaatttcacctggctcaccgggttaaagaccagatcgctgaagctgctcatttccatccgtaacgtatcgatgttgaaatgagcgccggtaggatactgcatccagccattggcattcagaatccataatgctgaaatattggagccgaaggccaccagccaggtgaccagcaggtgttggtatttattcagccgctgccagccgaaaaagaacaggccgacaaaagtggattcgagaaagaaggccagtaacgcttccatcgccagcggcgcgccgaaaatatcgcccacatagttcgaatagagcgaccagttagtcccgaactgaaactccatggtcaggccggtagccacaccgagagcaaaattgatcccgaagagcttgccccagaaacgcgtcatatcgcggtagacggttttccccgtcaccacatagatcgtctccatgacggccagcaaaaaaatcagcccaagcgtaagaggaacaaataaaaagtgatacagcgcggtcagcgcaaactgccagcgcgataagtcaatgacatcccacatgctaactcctgtaggcagaaagagagtaaaaagctaatcagtaccggacaccggtgacgttcctgttgagagcgttagcgcgtctccagccatcggcagacttcatccaggcgctggcgcgaatcggccagatcttccggggccgccagtaccagctccggcaaaagacaaatctcatagctatcgagcaatggccctttaagggcgtccagacagcgcacatgccagagatggcgcaatgctgtggcgttgatttggctttcgccatacccggagatgcgaatctggatgttcccgtatccgcataaacgcgccagaaaaaggcgatcggcctcgctgagcggcagttgggtcaaattgatgctgtgaggttgcaacgccggatcgcgtacgtgcgccaataattcatgggccagcggcagtccattcatcaggccagcgacaggcggaggcagtagagagtcgtcaggcagcgtatcggcggtagccgcttgccataatgtcaggggcgcgctacccgcttccagacgatccgtcagcagacgtcggttatgcagatggcgtacccgccacaggccgcagaagatggtctcctggatctcgctttcactcccgtccggatgctgaatgcgtaccgagacttcgccttcgcccaatagcgtattgaggaatgagagatcatcggcattcaggggagataactcccatcccagcacgtcgccgacttccgggatgcgccgggcaagctgacctcgcagatcggtcaacaatgccatcaccgccgggctgtgagcgcagcgctccagcgccgccatacttgggtcgccattgacctgacaggtgagcggtaagggattcatcgagaaactagcgtcatcaggctgcgtacctggccccagcagatgaaaaaaggcgttgctcattgtactgtctcctgcgctgcgggagtgtcaaccatcgaacgcatcagcgtgagcagttcagcccagggatgaatgccgctgagcgcgccgcgtagctcgccgtctgtaaaaaccaacgtcgccggaaaccgacgtacattaaagcgatcgccgatagcttcgctttgttcaaggtcggccaccgccacctgccagtcaaactgcgggaactcacgcaggagttcggcaatcatcaccgggttatcgctgacttccggcgtacgccgcggatcgctacttaacaggatgacgccatctccaacccgtttgatccagtcgtctaccgtagaagcctctaccggttgccatccacgggttaacaggcgttgccatagcgcagagaacggggtgtcattcgccacttcttttgccctccagacgtgtctgatactgacgtatgcgcactccctcataattttccatcgacaggcatttatagttcaggcagcgtgcgacctcgtttgcctgcggtacgatcccccaggcggccagttgcgccagggcggcctgttccgccgccggtagctggccgcgagctatttcgctcaggctaccgccgtagtcgtccaggtgcgccggttgcagaccgaccagcgcaatgtgacagggcagatgcccgcggatgtcggccagcgccagaacttcggaaaaactgttttgatgcaggctcatttttttggcgctgagatacgcggggattttctcgccggcataggttcgcaggctgcccggcgccaggccgtaatcgatcgcgtcaaggagcaggagatggctggcttgctcaacataacctaacaggtttagcccttgcgtaccgccgtccacaatttctacctcttcaggccagtgatatcgggcatacaaacgctccgcgacccggataccgaatccttcatcggcccacagcaggtttcctaaccccatcaccactacgcgttgcgcattcatgagggctccttgtcgtgcggtttggggaatttgtggctgcgatagccattgatcatggtggagatcaccgtatcgtcggacataatgtcttcccggatagcgaggtaaacgtgcccgacgatgaaggcggcgatcagccacatacccagtcggtgccagctgtgaatatcgatggagttgccgccggtccagtagaaaaattcaaccacatagcggaacggcgcaaagatggcgtactggctatgctcgccaaacagagcgaaaccggtgaggatcataaataccgacaacaggaaatagccgaacatcgcggcctgcgcgacagggttatgtccgatgtcgcttcccggttttttctccagaaacagataccagcggaccacggagaaagcgccttgccaccaactgcgacgccagaccgggacgataaacagctctcgcgaatagcggttgccgacacaggcccaataaattcgccccagcagtaacacggtaaagatcatcgcggcggcaaagtggatcagccggatatagcccatgtaaaacagataggtcgcctcgccactcaccgacggcaagggccggccaatgaagtagcctgttaccatcagtaccaacatgcaggccaccgttagccagtgccacaggcgtaccggcgcttcaaacacatagtggttgacggcagtatcacgcgcctccccgacgcgtggagatagctttccagtcatcgttcttttccttaacgcttagcgtacctggacggcaatcagttcgctgccgtcgtcgccgagcacgtgggttgaacaggcgaggcaggggtcgaagctgtgcagcgtcctcaggatttctaacggttggtcgggaatcgccatttgcgttcccatcaatgccgcttcataggcgccgatctgttttttaggatcgcgcgggctggcgttccaggtggtggggaccacgcactgatagagttcaatcttctgatcgcgtattgacgcccagtgtcccaacgctccacgaggcgcttcggtaaaaccgatgccgcggcagtgctgcggccaactggccggttcccatttctcggtattggcggtggccaggtcgccgtttttcaggttggtcataagcctgtcgaaaaaatactgcagcttaccgacggcccattgcgcttcgtgcgcgcggcataaaatacggccaagcgtagactggataccggagagcggcagtttaagggcagacatcatgcgatctaccgactctatggtggcggcatcccctttgtggtacgcgataagcgttcgggcaagcgggccgacttccatggcatgaccccgccagcgcggcgctttaatccaggagtaacgttcctgctcgttgagctgctggatatgcgtatcgctgcctttgacatcacccgggttgtaccagggatcggtaatgccgtcaaaaggatgacgccccagccgatcgtccggatagcggtaccaggcgtgatccacaaactcctgtatctgctgcggatcggccaaatctaccggcatgacatttttaaaatcgccattgaccaccgcgccgcccggcattaacaggctttgctggctgaagtcgttggcaatgtccggaaatgcgccgtagctcagcacgcatttatccgacagaccggtgccaatttgactccatgctttattgaactggccgatagccagcgcgtccggaaccatcacgttgttaatgaagtcggcggtgcgggtgatgatcgactgcaccaggttgaggcgctccatattgatagccccgaccgcgccgctttgatcgagattgatcgcgcacggcattccgccgacgatccagttaggatgggggttcttaccgccaaatatggtatggattttgacgatctcgcgctggaagtcgagggcttcaagatagtgggcaaagcccatcagattagcctctggcgacagtttgtactgtggatgtccccaatagccgttacggaatatcccaagctggccgccatcgacaaatttctttaatcgattttgtacgtcaaagaagtagcccggcgatgacatcggccaggcggaaaggctttgcgccaactgcgaggtggcgcgcggatcggctttcagcgcattcagaacatcaatccagtccataccggctaactgataaaaatggaccagatgatcgtgacaccacaacgtagccagcatgatgttacgtataatattggcgttatccggcacctggataccaatcgcatcttcgatagcgtacaccgatgccagagcatgtaccccggtacatacaccacaaatacgttcaacaaacgcccaggcgtcacgcgggtcacggccttgcagaatgatctccagcccgcggaacattgtgccgcaggaaacggcattggtaatgacgttttgctcatcaatgttcacttcgcagcgcatatgcccttcgatgcgggtaatcgggtccacgatcagacgacggccggcgtcgttaacggtataaccctgggtttgatactggttactcatgcctgtttatcctcattgtccggctgttgttcggcttgcgctaactgttgtttgtggcgtttacgttggttgagcgcgctggcgacagcgtgaccgccaacgcccgccgcgaccacgcccagcgcggtcagccccaccgtatcggcggttgaatgggtacccatctggggaatatccaccacgcggctataaaacgagccgcgatcccagaaaccattttctgaacatcccagacatccgtgaccggactggataggaaaggagacgccgtcattccagcgtgtggaggagcaggcgttataggtggttggccctttacagcccatcttgtacagacagtatcccttgcgggcggcggcgtcatcccagctctcgacaaattcaccggcgtcaaaatgggcgcggcggtagcatttatcgtggatacgctgaccgtagaacatcagtggacggcccatgcgatcgagttccggcagacgatcaaacgtcaccatataggtgataatggcgctcatgacatccgggattggcggacatccagggactttcacgatcggcttgtcggtgatcactttatcgataggcgttgcctgggtcggattggggcgggcggcctggacgcaaccccaggaggcgcagtttccccaggcgataatagcgctggcgcccgcggcggctttcttcagtttttcaataaacgggcggccgccgctgatacagaacattccttgctctcctaacggcggattgccttccaccgccagaatgtatttcccggcgtagcgagtggtaatatcgtcaaagacttcttcggcctgtgcgccggcggcggccatcagggtgtcgtcataatcgagggaaatcagcgagaggatcacatctttggctagcgggtgcgaggaacggataaaggattcggtacagcaggtgcattccagtccatgaatccagaccaccggaatccgcggtttattctccagcgcccaggcgatctttggcgtcattccggcgcccagccccagcgatgtggcagcaaggctacagaatttgagaaagctgcgtcgggtcactcccttacgacgcatggcttgataaaaggtctcctcgttattcataacgcgtattttttctcctttttgcaccacgctccgccaggggcataaggcgcttttgcgggtccgttgacgttccgccagcaaggtaaatcattgggttacgcgcgagcgcggaaacgagcccgattcactttgcaccggcgtatatcgccagaaataatgtaaaaaaagcgtatcggattaacgataagaaacaatgtgaagtgtgtgggtatagcttatagcggtatatttatacccattatcggtttttcggcgaaagggccgcggcggggaaggacggttgagcttgttccgggatgaggtttttagcgagtgaccctggcctaatatcagagccaggcttaagagtttgcgggtatgttgcgtgatcacgatgcagtcacgcatcccccggatcttgacgggcgtaaagtgaataaacctggcctgttgtcagttttacgttcttcgtggtgtgctctgacgataatgtagtccaccgaccatataaattctcctcgctcaccgcctggcccgatctctgacgaaaactctgaatcttcgatgtttccaattatgaatttctacaccagtctttaagcatcaatgcattgtacctggtgcgctgctataactgtgtaagagggattgacgcttagagcctatcccattagggctattttacttgccattttggtcctgggcagtgctcgccaaaacgcgttagcgttttgaacgccgcttgcggcggcccgaagggcgagcgtagcgagtcaaacctcacgtacaacgtgtacgctccggtttttgcgcgctgtccgtgtccaaacaggctgcgccaataacgcctggtgggataggctcttagtgttaatgtacaccaaaggtcgatgtgtttaccgcacttgtggcttggtatgcagtatgtataattattgcgtgaatgttttcataaattgatttgtctcttctttggccttttctattgatttatgtttatatatttttgattggtatgtgtatttttctaacgcaggtaagtacttagagacgtcgttaccttttttgaaatctataggcatatgaatactcgcatataatatatttatcctctgcgatggcgttagctcagaataatttataccttgttcataataagaaagcatcacatcattgcagatcctgtctttatacgactgccctatgtatgcgatgataagtccatatataagtagcaatccaaaagcgacacctgctttgtggctatgaagaaaattatattgtagcccaacaaaaaacacttttctaattaaaacaagaataaatggtaaggaaaataaaaaacaaccgaagtacataatcacttcgcctgaattctgaaacattttataccttcctgataaatactgggttaattatctggttaatattcgttgtctattatttcttttataaaaatagacgattcattgaaattttttttgaaactggagtaattgctaagtgttttcggtatgcaaaagatgactcgcccattttttactatggcataatatcttggatacattagtgcttcttcttttgtgtttggaacaccgtcatagtctattttttcatcaatagagtcaagttggctaaataaaaagactcttttccttagcaaagtattatgaacaatagcattttcatatatatcaagtgacattgtaagactcaatgcagcaaatgaaagtaatgctatgatggaaattgttaatattgctaatgacaagccttcctggcaatataaaacaagaaaaaagagtgggattgcagggaggtaagtgaccaacgggtaaaaacgatcgatttttaaatgtgatatgatattctgaggagatgtgacatggtcctgaacgcccttgttaaagataatgctgtaaagcgtcaaactattgtcaattttatctattgctttagcttttatcctttgtgtgaatataaaaaacgttatcaaaaaggcaataaataagaaaatgattaaattataaataaaactatccacggcatcatcctgtatatttaccgaaatttctatggtcactattctactattattaatgaatgtcaatctaaaattgatgatggtgcgtccagccggttggatttgatctaaaataaaactttcggtatttctctatagtcacagagcaaacagggttgattctttgttaaaaaaacatctcaatattttaatatgaattccttcacgcgattctggagtattacagtctacgattttaatgattttttattcattcattatgcgtattaaattaatggcagtgcaatcgcaaattataattagtttcagaattgcaaaatgattataattttgtagttcatgccgttgccctaagagccccggtggtgagtgtaggggggaacacctgaacaagatctgaggctatgtacgatactgtgatatgagttaacccaaacaggctatacggtatctatacctttctaaaaagcttttcgctggtatagagtcaaaaccttagacgaaacaacattcacactatagccctggcagtgcggcattgcgtatcggtgagcataacggggccttgtttatttattataccgttcttgtacttacttaaaatgaagatggaagaatgttgtactcatttttgacagcattgttacgagatgagttgagacattatgaaatgaaaaatccacgccattgcgtggattttatagagttttaccgctgtcatgaggttcaatgaaacctcataagacaacaaatgttatttagacgttgaacaggaagttcattatatcgccatctttaacgatgtaatctttgccttccgctcgcatcttaccggcttctttcgcgccttgttcacctttataggtaataaagtcgtcaaaggcgatagtttgggcgcggataaagcctttttcgaagtcggtatggattttacctgctgcctgcggcgcggttgcgccaaccggaatggtccatgcgcgaacttctttcactccggcggtaaagtaggtctggaggttcagcaggcgataacctgcgcgaataacgcggttcagccccggctcttccagacccagttcagccataaattcgtcgcgctcgtcatcatccagctcagcaatatcagcttcgacggcggcacacaccggaaccacgaccgaaccttctttcgcggcgatttcgcgaacctggtccagatacgggttattttcaaaaccgtcttcattgacgttagcgatatacattgtcggcttcagcgtcaggaagcttaaataacggatagccgctttatcttcgtccgtcaggtccagcgaacgcagcatccccgcttcggccaggtgcggcaggcatttttccagcgcggccagttccgctttggcgtctttatcgccgcctttggctttcttctgtacgcgatggatagcgcgctcgcaggtatcgaggtcagccagcgccagttcggtattgataacatcaatatcttctgccgggtttactttacccgccacatggatgatattgtcgttctcaaagcagcgaaccacgtgaccgatagcttcagtttcacggatattggtcaggaactggttacccaacccttcgcctttggacgcgccttttaccagaccggcgatatccacgaactccatcgtggttggtagaatgcgttgcggtttaacaatctcagccaactggtccagacgcggatcgggcatcggcacgacaccggtattcggttcgatagtgcagaacggaaagtttgccgcttcaataccggcttttgtcagcgcgttgaacagggtggatttcccgacgttgggcagaccgacgataccgcatttgaatcccatgatttaactcaccttaatatcttaataatcaacctgttatagaaaacagattgcagaaatggaaataacttcgcctattatacacggcgtgcggcaaaaatgccgcacatcactggttattgcgccttaaaggtatgcaaacggcttgttgctttggccagaccctctttgaaccacaattccgtacagcgtgccgcttcgtcaatggcctcatcaattaatttttgttcagaaacagggggtttacccagcacgaaaccaacaactttatttttatcgcctggatgaccaattccaacgcgtaagcggtgaaagttgggattattgcccagcttgctgatgatgtctttcagaccattgtggccgccgtggccgccgccaagtttaaatttcgcgacgcccggcgggagatccagctcgtcgtgagcgaccagaatttcgtccggctgaatacggtaaaaactggccattgcgccaactgctttaccactgaggttcatgaacgtggtgggtaccagcaggcgaacatcttccccttccagcgtgatgcgtgaggtatagccaaagaatttaggctcttcacgcaacggcgcgcgcaggcgctccgccagtaaatcgacgtaccatgcgcctgcattgtgtcgcgtcgcggcatattccgcgccgggattcgccagaccaacaatcaatttaattgccacgttttttgtcctgagtagatccataactggcgcgtagtttactgtctgtctgcccgcttgacaaaacacagcggcactctgaagtaaattaaataattgccagcattgattattaaaaatgtaaactgttcagagtgttatttgtaaagttttgttaaatgaaactttacatttgtgatcgcacccgcacttacaaacgaaagtgttgtctatactttacacataaagtttagggggatttcctaaaaacaacccaaaagttccggaggtgacatatgaaacgcaaaaacgcttcgttattcggtaacgtgctgatggggttggggctggtcgtgatggttgtcggcgtgggttactctattttaaaccaactgccgcagtttaatttgccgcaattttttgcgcatggcgcaatactgagtatttttgtcggggcggttctttggctggcaggggctcgtgtaggggggcatgagcaggtgagcgacaaatattggtgggtacgtcactatgacaaacgttgccgccgtaacgacaatcgtcgtcatagctaaccggttcaggcccggtaagcgttatcgccaccgggcattgtccattaacttagtaaatccgctaacgcctccgtcctgtttgggaagaaggtcagacgcccaggaataggtttgataccggcacgcgccattgtgcgcagcggttggaactccagattactgatacgcaattcgcaaccctccggcagacgcttcacaaaacgctgaaaagcatcaagcccgcctgcatccagcactggtactgcgtcccatttcagaacgacgatacgtttgcccttaatacgtgactcaaggtcggtaaacagcccttccgccgcggcgaaaaagagcggaccgataacacgcagcaccagcacatcttcaggtacatcaacattgaccggcgcaagtcgagtcattcgcgcaatacggcgcataaacagcagggaagcaaggacaatccccacgctgatggcgatgaccatatcaaacagaaccgttaatgacatgcacagcagcataacgataatgtcgtctttcggcgcatggcgtaacagatccaccactttatgggcttcactcatattccatgccaccatcagcagtagcgccgccatcgcggaaagcggcagccaggagagtagcggggccaagaccagtagagccagaatgaccaggatagcgtgaattaccgccgagatgggagaggtcgcgccagcgcggacgttggcggcagagcgggcaatcgcggcggtggcggtgatgccgccaaagaacggcgcgaccatattccccagcccctggccgataagttcgctgttagctttatgtttggtgccggtcatgccgtccagcacgacggcgcagagcaatgattcgattgcccccagcattgccatcgagaaggccgctggcagcagcgcgcgcagtgaatcccagcttagcgtgaaatcggagccaggaagactccacggcagcatcagttgcggcaggagctgcgggatgccgttgccctgagtgccgtcagccagaacgtaatggaactgtgagccgatagtcgccacattgccgcccagcagattaacaatccccattacggcgcaaccggccagcagcgcgggaagatgtcctggcagacgaataccgagacgcggccagaaaatcaacgttcccagcgttaccacgccaatggcggcatcgccaatattgacggtgggcaacgccataaacagcgcgccgactttctgcaaatagtgctctggcacatgggccatctgcagaccaagaaaatctttaatctgcatggtaccgatggtaataccaatccctgaggtaaaacccaacgtgaccgacaccgggatatattcaatcaatcgccccagtctcgccaggccgaaaaggatcaggaagaagcccgacatcagcgtggcgaccagtaggcccgccagaccaaactgttgcgataccggatacaaaatcaccacaaacgcggcggtagggccggaaacgctaaagcgcgagccgccggttagcgcgatcacgatcccggcgacagcggaggtatagaggccatactgcggcgcaacgccactgccaattgccagcgccatcgccagcgggatagcaataatcccgacggtgatcccggctatcacatcgcgggtgaaccgggaggcggtatatttttctttccagcaagcatcgatgagagcgcggaaaggcatcacatgtgaggaaaataatttgttcacaataatgtttcatccatgagcgcatcatctgtcaactaaatggcaggtgaaggaggcataagtcatacaaaagggtgttacagacaaaaaaacccgccgcagcgggtttcagatccgggttcgatcaatgctcgaacatggcggaaatcgattcttcgttgctgatacggcgaatcgcttcggccagcatacctgacagggtcaaggtacgcacgttcggcagcgctttgatttcgtcggtcagcggaatggtgtcgcagacaacgacttcatcaatgacggagttgcgcaggttgtttgccgcattgcctgagaagatcgggtgcgtcgcgtaggcaaacacgcgtttagcgccacgttctttcaatgcttctgctgctttgcacagagtaccgccggtatcgatcatatcatcaaccagcacgcagtcacggccagcgacgtcgccgatgatgtgcatcacctgagaaacgttcgcgcgcggacgacgtttatcaatgatagccatatcggtatcgttcagcagcttagcgatagcgcgggcacgaaccacgccgccaatatccggggaaaccacgatcgggttatccagattcagttgcagcatatcttcgagcaggattgggctaccgaacacgttatcaaccggaacgtcaaagaagccctggatctgttcagcatgcagatctacggtgagaacgcggtcaacgccgacgctggacaggaagtcagcgacaacttttgcggtaatcggcacacgggcggaacgtacgcgacggtcctgacgtgcatagccaaagtaggggataacggcggtgatacgacctgcggaagcacgacgcagggcatcaaccataacgaccaattccatcaggttgtcgttggttggggcacaagtggactggatgatgaaaatatcaccaccgcgtacattttcgttgatttgtacgctgacttcgccgtcgctaaagcgacctacggcggcgtcgccgagagaagtgtacaggcggttggcaatacgttgtgctagttccggggtggcgttaccagcaaaaagcttcatatcaggcacgagaagaacctcaggcatgcgtccattggtggaaagaatctgccgaaaactgtgcgggccaggcaaaatcctatccaggcggtgtattaaagagcgcgatgcaacgtctggaacaaggtgacgttgtcaccgaagctcagcttgcccggcttactcgtcttcattcacgtttcatgtgcgctggtatcaatgcctcacaccggtcaaatacggcatatatgaccggcgactcgtcatttcgccatcttcctgaaacccgaatgcgttagagtaactctcgatgcaatggggaaaggttgacacccttcgccacaaaagcattgagccattccggggcttgctcaagcacctggcgagcacaagactctgtatcgaattcagcaaagacacaggcccctgtcccagtcaggcgcgacggcgcgtattctaacagccaggaaagcgccgcatcaacctcgcgaaaacgttttcttgcgataacctcgcaatcattgctgaattcacattttagtaacgtatctattgacctttttggcgtattacgcggcaattgaggatctttaaagataaccggcgtcggaatgcttacgccagggtgcgcgaccagataccatttttccggcggattcaccggcgttaatatttcgcctacgccttcggcaaacgcggcgtggccacgaacaaagaccgggacgtcggcgccgagcgtcaggccgagcgtcgccagttcatcaatggaaagcccgcattgccaaagatgattgagcgccaccagaacggtcgcggcgttagacgagccgccgcccagaccgccgcccatgggaaggcgcttctcaatgctgatatccgcgccgcttccggcgggcaggcgtccactctccgaggcgactttcatcaacagccgcgcggcgcggacgatcaggttgtcttcattttcaacgccggttaccggcgttaataaatggatttcgccatcgcgacgcggttcgatgtggagtgtgtcgccataatccagaaactgaaacagcgtctgcagcgtgtggtagccgtctgcacgctgtccggtgatatataaaaacagatttaattttgccggagaaggccaatgggtcatcatttcacaatccagttatccattttcagcttaatgcgctgactgccgtcggaaagctccatattggcaggcatggcaggctgcgttttgctgtcatagccaccgtaaaccactttccagtttttaccatcctggcgatagttcacttcgctcaggcggtactggtcgtccagtttgtagtcagtggcatcgccaggcagaccgaggatccactgccgcaggctgtttaacggaatcggcatcccggtgagtttgccgatcatctcttcggcgtcatcggcggtataacgctggcctttgttatccaccaactggacgttgcccggctgggcgttaagctccagctcggtgctgcccagcgggttggtaagcagcaggcggtagcgatcctgtccggtctgttgccagaagaagcgcgcatagactttctgatcatctgagatgtaagcaaaggcgccgcgcgtctggtattgattcagatgacgcacctcttgctgatgctggcgccactgaggggaatccgggctcttgcccgggcctttatgcccaggaagcgtacaggcggtgagaaccaggcttgctaacggcagtagacgaatcaggcgaaaatcgggcagggtcatagtgatgacgaatccttgtgatacggtgcaataattgcctgatggcgttacgcttatcaggcctgaaaactgaacctgcaggctgtaaaaacgttcgcgccgcgattcggcaaatttttgctatcggttacagttatagcctttaatgctagcgccgcctggtgacatcgtctactttcaagttgtcttaaatcatcaaattagcgagcgctgccaattactccaaaagggggctctctcttttattgaccacgcgcatcctgtatgatgcaagcagactaaccatatcaacgctggtactactcccgcagacatgacccttttagcgctcggtattaaccataaaacggcacctgtatcgctgcgagaacgcgtaacgttttcgccggacacgcttgatcaggcgctggacagcctgcttgcgcagccaatggtgcagggcggggtcgtgctgtcaacctgtaaccgtacagagctgtatctgagcgtggaagagcaggataacctgcaagaagcgctgatccgctggttatgcgattaccataacctgaacgaggacgatctgcgcaacagtctgtactggcatcaggacaatgacgccgtcagccacctgatgcgcgtcgccagcggtctggattcactggtgctgggcgaaccgcaaatcctcggtcaggtgaaaaaagcgtttgcggattcgcaaaaaggccaccttaacgccagcgcgctggagcgaatgtttcagaagtctttttccgtcgccaagcgagtgcggactgaaaccgatatcggcgccagcgccgtctccgtcgcgtttgccgcctgtacgctcgcccgccaaatctttgaatcgctgtcgacggtcaccgtactgttagttggcgcgggcgaaaccattgaactggtggcgcgtcacctgcgcgagcataaagtacaaaagatgattatcgccaaccgaacccgcgagcgcgcgcaagccctggcggatgaggtaggcgctgaggttatctcgctcagcgatatcgacgcccgcttgcaggatgccgatattatcatcagttcgaccgccagcccgctgccgattatcggtaaaggcatggtggagcgcgcattaaaaagccgtcgcaaccagccgatgctgctggtggatatcgccgtaccgcgcgacgttgagccggaagtcggcaaactggcgaacgcttatctttatagcgtcgatgatttacagagcatcatttcgcataatctggcgcagcgtcaggctgcggcggtggaagcggaaacgattgttgagcaggaagccagcgagtttatggcctggctacgcgcccaaggggccagcgagaccattcgggaataccgtagtcagtcggagcagattcgtgacgaactgactaccaaagcgctgtcggcccttcaacagggcggtgatgcgcaagccatcttgcaggatctggcatggaaactgaccaaccgcctgattcatgcgccaacgaaatcacttcaacaggctgcccgtgacggggatgacgaacgcctgaatattctgcgcgacagcctcgggctggagtagcagcacacaccacacttttttacagggtgaatttacgcctatgaagccttctatcgttgccaaactggaagccctgcacgaacgccatgaggaagttcaggcgttgctgggcgatgcgggaattattgccgaccaggaccgctttcgcgcattgtcgcgcgaatatgcgcaattaagcgacgtttctcgctgttttacggactggcaacaggttcaggacgatatcgagacggctcagatgatgctcgacgatcctgaaatgcgagaaatggcgcaggaagaactgcgcgaagcgaaagaaaaaagcgaacaactggagcaacagttacaggtactgctgctgccgaaagatccggacgatgaacgaaacgcgttccttgaggttcgcgccggtaccggcggcgacgaagccgcgctgtttgccggcgatctgttccgcatgtacagccgttatgccgaagcgcgccgctggcgcgtggagatcatgagcatgagcgaaggcgagcatggcggttataaagagatcatcgccaaaatcagcggcgacggggtgtatggccgactgaagtttgagtccggcggacaccgcgtacagcgtgttccggcgaccgagtcgcaggggcgtatccatacctccgcctgtaccgtcgccgtgatgccggagctgccggaagccgagctgccggatattaacccggcggatctgcgcattgatacgtttcgttcttccggcgcgggcggtcagcacgttaacaccaccgactccgctatccgtattacccacttgccgaccggcatcgtggtggaatgccaggacgagcgttcgcagcataaaaacaaagcgaaagcgctctcggtgctcggggcgcgcattcacgccgccgaaacggcaaaacgccagcaggccgaggcgtcaacgcgccgcaacctgcttggcagcggcgatcgcagcgatcgtaaccggacctataatttcccgcaggggcgcgtgaccgatcatcgtattaatctgacgttatatcgccttgatgaaacgatggaaggtaagctggatatgctgattgagccgattgttcaggaacaccaggctgacctgttagccgccttatccgagcaggaataatggattttcagcactggctgcatgaggcggtaaaccagctccgggacagcgacagcccccggcgcgacgccgagatcctgctagagtacgttacgggcaaggggcggacgtatatcatggcctttggcgaaacgccgcttaccgacgtccagcaacaacagctcgcggacctgctgcagcggcgtaaacagggcgaacctattgcgtacctgacgggcttacgcgaattctggtcgctgccgctcttcgtttctcccgccacgctaatcccgcgcccggataccgaatgtctggttgaacaggcgttggcgcgattgccggtaaaaacctgtcgtattctggatttaggcaccggaaccggcgcgattgcgctggcgctggcctgcgagcgaccggattgcgaggtgactgcggtcgatcgtatgcctgatgcggttgcgctggcgatacgcaacgcggaacatttggctatccggaatgtgcgtatactgcaaagttgttggttcagcgcgctatcggggcagcagttcgacatgattgtcagcaatccgccctacattgacgcgcaggacccgcaccttagcgaaggcgatgtacgctttgaaccgcgctcggcgttggtggcggacgaaaacggtatggcggatcttacgcatattatcgataacgcccgccagatgttaacgcccggcggcttcctgctgctggaacacggttggcagcagggcgaagcggtaagagcggttttcaggcggtctggttactcggatgtagaaacgtgtcgtgattatggcggtaatgaacgcgtgacctgcggacgttttacgccatgacaattgcaatgttgctcacgcttcatcttatctgtgttgcgctctccgtcagtttgtttgtcgctcgttactggtggcgctattgcggccatgcgttggccgccgcgcgctggacacgaatcgtgcctcccgtcatagataccctgttactgcttagcggtattgggttaatcgttaaaacgcacatcctgccattcacggagtcgggctcatggctgactggaaaactgtttggcgttatcatctacatcgttttgggttttattgcgcttgattatcgtcaggcgcgcagccagcaggcgcgttttatcgctttcccgctggcgctggtggtgctgtacatcatcattaaactcgccaccacaaaaataccgttactggggtaagtcatgaggtcgttagctgatttcgaatttaacaatgcgccgctgtgtgatggcatgatcctggcatcagagatgattcgcctggattttcccacgcagtttgtctacgacgaactggaacgtctggtcagtctggcgcaggaagaaattagccagctcctgtctcaggatgagcaactggaaaaattgctggcacttttttacggcgagtgggggttcacggactcccgcggcgtctaccgtctttctgatgctttatggctcgataaagtcctgaaaaaacgccagggtagcgcggtatcgttgggcgctattttattatggatagcaaaccgtcttgatttgccgttggtgcccgttatcttcccaacgcagttgattttgcgtattgaatcgctggaaggggaaatgtggctgattaacccgttcaacggtgaaacgcttgatgaacataccctcgaagtctggttaaaaggcaatattagtccggtcgccgagttgtttaacgaagatttggacgaggcggataacgccgaagtgattcgtaagctactggatacgctgaaatcctcgctgatggaggaacggcaaatggagctggcgctacgcgttagcgaagcattgttgcaatttaacccggaagatccttacgaaatccgtgaccgcgggttgatctacgcgcagcttgagtgtgaacacgttgcgctgactgatttaagctacttcgttgaacagtgtccggaagacccgatcagcgaaatgattcgtgcgcagatcaacaccattgcgcacaagcaaattgttctacattaattaaccgacattttacctataagtgtaaggcgatcctatgaaacaaaaagtggttaacattggtgacattaaggtggcaaatgacctgccgtttgtgctgtttggcggtatgaacgtgctggagtcacgcgatctggcaatgcgcatttgtgagcactacgtaaccgttacccagaagctgggtattccttacgtgttcaaggcctcttttgataaagccaaccgttcctctattcactcttaccgtgggccgggcctggaagaagggatgaaaatcttccaggaactcaaacagacatttggcgtaaaagtgatcactgacgtccatgaagccagccaggcgcagcctgtggctgatgtggttgacgtgattcagctcccggcgtttctggcgcgccagaccgacctggtggaagcgatggcgaaaaccggcgctgtgattaacgtgaaaaagccgcagttcgtaagcccgggtcagatgggcaatatcgtggataagttccatgagggcggtaacgataaggtgattctgtgcgaccgcggcgcgaacttcggttatgacaacctggtggtggatatgctgggctttagcgtgatgaaaaaggtctccggcaactcgccggtgattttcgacgttacccatgcgctgcaatgccgcgacccatttggcgctgcctcgggcggtcgtcgtggtcaggtgaccgagctggcgcgcgccggtatggctgtcggtctggcgggcctgttcctggagtcgcatccggacccggctaacgcgaagtgcgacggtccttccgcgctgccgctggcgaaactggagcagttcctgacccagataaaagcgattgatgatttggtgaaaagcttcgacgagctggataccgagaactgattgcggtttttagcttgtgtaggccggataagatactatccggcttttttatatcaggcaaaaatcgtcatcagataggcggcaaataaagccagatgcgccgcgccgtttagcacgttggtgcgtccggtagagaacgaaatatggcacagcactaacgaggccaccatcactaccatttccggcgcgcctaaaccaaacaccagatcattacctgtcgcccaggcgatgagcgtgacgaccggcacggttaatgaaatcgtcgccaacaccgatccgaagaacagattcattgcccgctgaacctgattattcagtaccgccttcagcgcgcccagtccttccggcgagagaattaacagcgcgaccaggaaaccggtaaaggcgaccggggcgttcatgctggtcagcaacgcctccagcgggctggcattcattttggtaacggcaatgaccgcaattaaatgaatgagtaaccagaccgtatgccagccgctactgtgcgcggagggtttaccgtggtgtggattgtcatcatcgccttcatcttcatgttcatagataaataagctctggtgcgttttggtttgaatcaacaaaaatacgccgtacatcgcggcggaaattaacgcgaccaataatgcctgactggtagagaaattggcttgcggcaatgccatgggaaaaaccagcacaataatcgccagcggaaatagcgcaataagatactgcttaatcccaaataaattcatatattgcgttgcgaatttacgcccgcccaacaacaacgagaaaccgaccagtcccccggtgacaatcataataatagagtagagcgtatcgcgcataagcgttggcgcagcatcgccggtagccatcagcgcggaaattaaactcacctcaagaataacgacggacaagcttaaaataagcgatccatagggttcgccgagtcggtgcgctaatacatcggcatgacggaccacgctaaatgcgctgcttaaaataccaataagtgcaaggatattgatgccaataaccactggtagtgactggctgcttccccaaaggaacagcactaccagcgcaagaaccgggaaaataagcgaagtctccttatggcgggttttcaccgcctcacaggcatgtgtcatgagggtctcccttgtgcaggtgttaatattttggaaagagtaaagaaggtaaaaatagcagaaatttgtatttttttagtggttttttacgtagttttacggcgtagacgatttttttctttcaaggtcagtaaaacaacgatcttgttttaacagtgtttaaataacaaaaagttaatttccgtaaaaagcaaaaatcctcctcgactggcgtaataacgcattgtttaccacacttaatgttttccctgaagacggaggcgctgatgccgtataaagccaaaagtgatttacccgataatgtgcggaatgttcttccaacccatgcccaggacatttacaaagaagcctttaatagcgcctgggagcaatataaagataaagccgatcgtcgtgatgacgccagccgcgaggaaaccgcacacaaagtcgcctgggcggcggttaaaaacgattatgaaaaaggcgagaatgataaatggcataagaaaaaataaacgcggtattactcacgtgttagcctgattttcttgccggaagtctatcctgacgcgggagcttttcccgcgtacagattcaaaatgtcagcactttgtccgccgccagcgtccattgcgccagctcgaccagcgttccgatttccacaccgtcaatcagcggcaggggagtgataccacgtccgtccgcacaggttttgcataattttaccggtacgttttgcgcggtcagaatttccagcatttgctgaatattgtagccttcggctggtttttgaccgcgtaaccctgcggttacggcatctgacatcaaaaacaggcgtaaatcgagatggctttcctgctcgcgcagcgcaatggccagacgcaggctattaaataatgattcgctgccgtaggcggcgccgttagcgataatgacgatattttgcatggataacccttctccttgagaaattttgtcggcaatggcgttatgttacctcgggaaccgggtaccgccaaatgcgtggataaaatcccgggacgctctgcggaaaaaataaggatattcctggaagcacgagaaaaggctgcaaaacctgtccggacacgttatggtttactctgatgccattcctcttatcttttgttgtagaagttgccgacacgttgagccgtattgtttttcgttcattctcactctcgcttctcttgctggctgccagcggtacgatccgtgcgcaggcgcaagaccctttcacgcaaaaccgtctgccggatttaggcatgatgccggaatcccacgaaggggaaaagcattttgccgagatggccaaagcgtttggcgaagccagcatgaaaaataacgatctggatactggtgaacaggcgcggcaattcgctttcggacaggtacgcgatgtggtcagcgagcaggttaaccagcagcttgaaagctggctatcagcctggggcagcgccagcgtggatattaacgtcgataacgaaggtcattttaacggcagtcacggaagctggtttatccctttacaggataaacagcgctatctgacctggagccagcttggtcttacgcaacagactgatggactggtaagcaacgttggcataggacagcgctgggcgcaggatggctggcttcttggctataataccttttacgataatctgctggatgaaaatctgcagcgcgccggctttggcgcggaggcgtggggagaatatttgcgtttatccgccaactattatcagccttttgccgactggcagacgcatacggcgaccttagaacagcgaatggcgcgcgggtatgatatcaacgcgcaaatgcggctgccgttttaccagcatatcaataccagcgttagtctggagcagtactttggcgatagcgtggatctgtttgactccggaacggggtatcacaatcctgtcgcgttaaaactgggtctcaactatacgccagtacctttgcttaccatgaccgcccagcacaaacagggcgagagcggggtcagtcaaaataacctggggctgacgcttaactaccgcttcggcgtgccgctcaaaaagcagcttgccgccagtgaagtggcgcaaagccagtcattacgcggtagccgctatgatacgccgcaacgtaactcgctgccgacaatggagtatcggcagcgtaaaacgttaacggtttttctggcgacgccgccctgggatcttacgcctggtgagacggttgcgttaaaattgcaggtgcgcagcgtgcacggtattcgtcatttgagctggcagggcgatacacaggcattaagtttgacggcaggaacggacacccgcagtaccgagggctggacaatcattatgccggcctgggatcaccgcgaaggcgcggcaaatcgctggcgtttatcggtggtggttgaggatgaaaaagatcagcgtgtctcttccaatgagatcacgctcgcgctgactgaaccgtttatcacgatgccggacgataatccgcattggcaaccgttccaggagcaataattaaaagatgcgttcctgatgtacccagacggcggcctccacgcgcgatttcagcttcattttcttgagcatatgtttcacgtgcactttgaccgtactttcggtgatatccagacgccgggcaatcatcttattcggcaatccctgcgcgatgagcttcagaatatcgcgctcacgcggggtgagttgcgttacatcgcgatcggtggtggcgcggttggcccgcaggctggccgccagtaccggcgttaacgcttcacttaataccatttcgccggcggcggcctgttgtaacgctttgagcaagtcctccggctccatgtctttcaacaggtaaccgtccgcgccgcgctttagcgccgtgacgacatcttcttcatggttggatacgctgaaaacgacaatacgtcctgacagcgctttttcgcgtaatttatccagcgtttcgaggccattcattcccggcatattcaaatcaaggaggatcagatcgggatcgagcgattccgccaggtcaataccctgctcaccgttgctggcttctccgaccacgctgatatcgggcgccatactcacaagctgctttacacccgtgcgtagcatcggatggtcgtcgattaacaggatggttgccggttcctgattattcatgggtatctccctgggtttctgtgaagtttgtttctggaataaaagtaacagtgacctctgttccgccagtctcgcgtcggcgtacctggcaatcgccgcgcaaactttgcgcccgatcgcgcatgataatcatgccgtagtgattactgcgttcggcgttttccgggacgccgcagccattatcctgtacttttagtttgacctgtttgccacattgcgtcactgtcaccaccacatcgtcggcatgagagtgtttaagggcgttgctgagggcttccctggcaatttgcaacaggtgtatcgcctggtgtgaaggcaccaggcgggggggaagctgataatccagttttaccgtaaagccaaaccgggcgctgaactcctggcagcttgcttccagcgccggacgtagcccgggttccgtcaactgtaagcggaaagtggttaacagttcgcgcagttgcgcccaggagcagttcagctcattgcgaatttggctgagtaactcacggctgctttccggtaacacgtcgccctgcatttgcaggcagctcacctgcatcttcatacaagagagcgactgggcaatagaatcatgcagttcgcgggcaatggtggcacgctcttccatgacaatcaactgctgctggcgctcctgatgcctgtcgagcgccagagtcgcggtaagctgttcaaccagcgtgtccaccaactgttgctgatcgtggctgagatggcgtccatagggcagcgtcgccagcaaaataccgtattgggtgtgagagtcggtgagccgccattttaaggtggtgccgccgttaatcatcggcagggcgctacgtgggcaaaggtggcagcctttatcatcgcaactgatgtccgactgacaggtaaattcctggtgattatcttcatcttccaggtcatagactcgcagctcaatatcatgcaactgggttaaattttgcaggccattcagtaccggagaaagacgctcacatagcggagcctgtgaatgcagtcggcggttggcttgccacaaaaacgagagaatctggtttttatgttccagaccggctgttttttcctgtacgcgctgttccagtaccgcataactttcggccagttcttcagacatattattgagcgcagaacccaacgcggccatctcattgcgtccactgatattggcacgttgggtaaagtcgcgctgactgacggcgcgcgccattgataacaactgtttccagggctgcaaaaggcgaacacgtagccagataatcgtaaataccagcaatagcgccataaagatcgccattacccggtgaactaataccacgcgttcgatacgcaattcagtagtatggtcgaacgacgtcaccaggcgatccaggcccgccacaaagcgcgtgacatcttctgcgaccgcgtgcgcgttttgcgcgtgctgtagccctggcgagagttcgttatgccagtaatcctgcaacgctttaagctgcttttgctgcccgtctcgctcagcggcgcgggtcagttccgggctgaatgccgtttgctccatctcatccagcagcttttgatctttagcatccagcgggacagcggccagtagtcgatagctttgcatacgcaatgagcccgctttattaatcgcatgagcgctaccctgcacgccctgaaccagccagccggaaaccgccatccccgccacgccgatagcggtagagagcatgacaatcagcgccagttggttaaccagcgtaagaggagagaaacaccgtttaaacatgttaccttctttcttcggggtaatgtcgccgaaaaaacgtagcaaaaaagaggggcgtcaatcggctgtgccgctattctcaacgatacagcggagtatacccatacctataacgagttactccttaattgccgccgtagagaggtatctgcgacgggaaggagtagacagacacagcatggtgaaaaaccacagcttttttaccaaaatagcctactcattaagggtaataacgctttttagtcgccggtgatgacgacttttcctttgatttatatcaacttaccttcggcagtaaaccctaatgtggcagacatcaaatcaagaatcagaggtgtctatgagtcactcatccgccccggaaagggcaactggcgctgttatcacggaatggcgtccggaagatccggcattctggcagcagcacggccatcgtgtcgccagccgtaatttgtggatttctgtcccgtgtttactgctggcgttttgcgtctggatgctattcagcgcagtggcggtgaacctgccgaaagtgggatttaattttacgaccgatcagctctttatgttgactgcgctgccatctgtttccggcgcgctgctacgggtgccttactcctttatggtgccgctatttggcggacgtcgctggacagcgttcagtaccggtatcctcatcgtgccctgcgtatggttaggctttgccgttcaggataccagtacgccatttagcactttcattattatttccttgctgtgtggttttgccggcgcgaactttgcctccagtatggcgaacatcagctttttctttcctaaacaaaagcagggcggcgcgctgggtctgaacggtggtctgggcaatatgggcgtgagtgtgatgcagctggttgcgccgctggtggtttcgctctctatctttgccgcctttggcagccacggtgtagagcagccggacggttctcagctctatctggcgaacgcagcctggatttgggtgcctttcctggccatttttacgctggcggcgtggttcggcatgaacgaactggcgacgtctaaggcctcgctaaaagagcaactgccggtgctcaaacgtggtcatctgtggatcatgagtctgctgtatctggcgaccttcggatcgtttatcggtttctccgcggggttcgctatgctgtctaaaacacaattcccggatgtgcagatcctgcattatgcgtttttcggtccgtttatcggcgcgctggcgcgttcggcaggcggcgcaatttctgaccgtctgggggggactcgcgtcacgcttatcaactttgtcctgatggcgattttcagcggtctgctgttcctgacattacctactggcggcgttggaggtagctttatcgcgttctacggggtatttctggcgctatttctgacggcggggttggggagtggttctaccttccagatgatctccgttatcttccgtaaactgacgatggaccgggttaaagcggaaggcgggtcggacgaaagagccatgcgtgaagcggcgaccgatacggcggcggcgctgggctttatttccgcgattggcgcgattggcggcttttttattccgaaagcgtttggttcatctttagcattaactggttctccagtcggcgcgatgaaagtctttcttattttctatatcgcctgcgtcgttattacctgggcggtatatggacgtcattctaaaaataaaaagtaatttttgattatcctttgcgcggcgttagaccgcgcttttttttacctgtatttagttacaacatacttatagtcaagaagagaggcgcgacagggctgaccacgcacatttttatcggtcatccagggggataccccttaatacccacttgttgaaaatttaacattcaatttgtgcgtaaatttaattttatgtaattaaatcagtaatatatataaataaaactcctcctccaaaaggagtatgcaggaggtttgcgcgccatttgcatccctgtccgccttgatcgttatcaattctcacgcccattcagcgcgttaccttcgcccttagttaagcaatgtcgatttatcagagagccgtaaggttccacacaggagaaacccgatgagtaaattcctggaccggtttcgctacttcaagcagaagggcgaaacctttgccgatgggcacggccagcttctcgaaacaaaccgggactgggaggacggataccgccaacgttggcagcatgacaaaattgtgcgctcaacccatggggtgaactgcaccggttcttgtagctggaaaatttatgtcaaaaatggtctggtgacctgggaaacacagcaaaccgattacccacgcacccgtcccgatatgccaaaccatgaacctcgcggctgcccgcgcggcgcaagctactcctggtatctctacagcgctaaccgactgaaatatccgctgatgcgcaaacgtctgatgaagatgtggcgcgaggcgaaaaaactgcatcgcgatccggtagaggcatgggcctccatcattgaagatgccgataaagccaaaagcttcaaacaggcgcgtggtcgtggcggctttgttcgctcctcatggcaggaagtgaacgaactgatcgccgcttccaacgtgtacaccgtgaaaacctatggccctgaccgcgtcgcgggcttctcacccatcccggcgatgtcgatggtttcctacgcttccggcgcacgttatctttcactgattggcggtacctgcctgagcttctacgactggtactgcgatctgccgccagcctccccgcaaacctggggcgagcagaccgacgtgccggaatccgctgactggtacaactccagctatattatcgcctggggctctaacgtgccgcaaacccgtacgccggatgcccacttctttaccgaagtacgttacaaaggcactaaaaccgtcgcggtgacgccggactatgctgaaatcgccaaactgtgcgatctgtggctggcgccgaagcaggggaccgatgcggcgatggcgctggcgatgggccacgtcatgctgcgcgagttccacctcgacaacccgcgccagtacttcaccgattatgtccgtcgctataccgacatgccaatgctggtgatgcttgaagagcgtgatggttattatgccgcaggtcgtatgctgcgcgctgccgatctcgttgattcgctggggcaggaaaataacccggaatggaaaaccgtcgctatcaacagcaacggtgaaatggtggcgccaaacggttcaattggtttccgctggggcgaaaaaggcaaatggaacctcgaacagcgcgacgggactaccggtgcagaaactgaattgcagctcagcttgctgggcagccaggatgagattgctgacgtgggcttcccgtatttcggcggcgagggttcagagtactttaatcatgtggcgctggataacgtcctgctgcataaactgccggcaaaacgtctgcaactggccgatggttcttcagcgttagtcaccaccgtgtatgacctgaccatggcgaactatggtctggaacgcggcctgaacgatgaaaattgtgccgccagttatgatgataccaaagcgtatacgccagcatgggccgagcagatcaccggcgtgccgcgggcgcagatcatccgtatcgcacgggagttcgccgataacgcggacaaaacgcacgggcgttcaatgattatcgttggcgccggtctgaaccactggtatcacctcgatatgaactatcgcgggctgatcaatatgttggtgttctgtggttgcgttggtcagagcggcggcggttgggcgcactacgtcggccaggaaaaactgcgtccgcagaccggctggcagccgctggcgtttgcccttgactggcagcgtccggcgcgtcacatgaatagcacctcttacttctataaccactccagccagtggcgctacgagacggtgaccgccgaggaattactgtcgccgatggcggacaaatcccgctatagcggccatctgattgacttcaatgtgcgcgccgagcgtatgggctggttgccgtcggcaccgcagttaggtaccaacccgctgtatattgcgcgtgaagcggaaaaagccggtatgacgccggtagattataccgtcaaatccctgaaagagggttcgattcgctttgccgccgagcagccggaaaacggtaaaaaccacccgcgtaacctgttcatctggcgttcaaacctgcttgggtcttccggtaaaggtcacgagtatatgctgaaatatctgctgggtactgagcatggtattcaggggctggatctgggtaaacagggcggtgtgaagccggaagaagtggagtggcgtgacaatggcctggacggcaaactggatctggtggtgacgctggacttccgcctgtcgagcacctgcctgtactccgatatcgtactgccgaccgccacctggtatgaaaaagacgatatgaatacctcggatatgcatccgtttattcatccgctgtctgccgccgtagatccggcctgggaatcgaaaagcgactgggaaatctacaaaggcattgcgaagaaattctccgaagtctgtgtaggtcacctgggtaaagagactgacgtcgtgacgctgccgatccagcacgattctgccgctgaactggcgcagccgctggacgtgaaagactggaaaaaaggcgaatgcgatctgattccagggaaaaccgcgccgcacatcatgaccgttgagcgcgattacccggcgacttacgaacgctttacctctatcggcccgctgatggagaaaatcggcaacggcgggaaagggattgcctggaacacgcagagcgaaatggacttgctgcgtaagctcaattacaccaaagcggacggtccggcgaaaggccagccgatgctcaacacggcgattgacgcggcagagatgatcctgacgttagcgccggaaaccaacggtcaggtggcggtgaaagcctgggcggcgctgagcgagtttaccggtcgcgaccatacgcatctggcaaccaataaagaagaagagaaaatccgcttccgcgatattcaggcccagccgcgcaaaattatctccagcccgacctggtctggtctggaagatgagcatgtttcttataacgccggttataccaacgttcacgagctgatcccgtggcgtacgctgtctggtcgtcaacagttgtatcaggatcaccagtggatgcgcgacttcggcgaaagtctgctggtgtatcgcccaccgatcgacacccgctcggtgaaagcggtgatggggcgtaaatccaacggtaatccggagaaggcgctcaacttcctgacgccgcaccagaaatggggtatccactcgacctacagcgataacctgttgatgctgaccttgtcgcgtggcggcccgattgtatggatgagcgaaaccgacgccaaagatctgggcattgaagataacgactggatcgaagtcttcaacagcaacggcgcattgaccgcacgcgcagtggtcagccagcgtgtaccgacgggcatgaccatgatgtaccacgcgcaggaacgtatcgtaaacctgccggggtcggaaattacccagcagcgcggcggtattcataactcggtgacgcgcattacgccgaaaccgacccatatgatcggcggctatgcgcagttagcctacggctttaactactacggtaccgtcggctccaaccgcgatgagtttgtggtggtacgtaagatgaagaacattaactggttggatggcgaaggcaatgaccaggtacaggagagcgtaaaatgaaaattcgttcacaagtcggcatggtgctgaatctcgataagtgcatcggctgtcatacctgttcagtcacctgtaaaaacgtctggaccagtcgcgaaggtatggaatacgcgtggttcaacaacgtagaaagtaagcctggcgttggttttccgaatgactgggaaaatcaggaaaaatggaaaggcggctggatccgcaaaatcaacggcaaactacagccgcgcatgggcaaccgggcgctgctgctgggtaaaatcttcgctaacccgcatctgccgggcatcgacgactactacgagccgtttgattacgactaccagaacctgcataccgcgccggaaggcagcaaacatcagccgatcgcgcgtccgcgctcgctgattaccggccagcggatggacaaaattactagcgggccaaactgggaagagattctgggcggcgagttcgaaaaacgcgccaaagaccagaacttcgaaaacatgcagaaggcgatgtacggccagttcgaaaacaccttcatgatgtacttgccgcgcctgtgcgagcactgcctcaatccggcgtgcgtggcgacctgcccaagcggtgccatctacaagcgtgaagaagacggcattgtgctgatcgaccaggacaagtgccgcggctggcggatgtgtattaccggctgcccgtacaagaagatctacttcaactggaagagcggcaaatctgaaaaatgcatcttctgctatccgcgtattgaagcgggtcagccgactgtttgctcggaaacctgcgtgggccgtatccgttatcttggcgtactgctgtatgacgccgatgccattgaaagcgccgccagtacggaaaacgaaaaagatctgtaccagcgtcaactggacgtgttcctcgatccgaacgatccggctgtcattgagcaggcgttgaaggacggcgtgccgcagagcgtgatcgatgcggcgcagcaatcgccagtatacaaaatggcgatggactggaagctggcgctgccgctgcatccggaataccgcacgctgccgatggtctggtacgtgccgcctttgtcaccgattcagtctgccgccgacgcgggtgaactgggcagcaacggtattctgccggatgtagacagtctgcgtatcccggtgcagtacctggcgaatttgttgaccgctggcgacactcagccggtactgttggcgctgaaacggatgctggcgatgcgtcactacaaacgtgcggaaaccgtagacggtaaagtggatacccgcgcgctggaagaggtgggtttaagcgaagcccaggcgcaggaaatgtatcgttacctggcaattgctaattatgaagatcgctttgtggtgccgagcagccatcgtgaactggcgcgtgacgcattcccggagaaaagcggttgtggctttaccttcggcgatggttgccacgggtctgataccaaattcaatctgttcaacagccgccgcatcgacgctgttgatgtgaccagcaaaacggagccgcacgcatgattgaactcgtcattgtttcgcgtctgctcgagtacccggatgctgccctgtggcagcatcagcaggagttgttcgatgcgctcgcgtcatctgagaacctggagaaagaggatgcccagactctgggcgttttcctgcgcgatttaaccgcgcaggacctgctggatgtacaggccgcttatagcgaactgtttgaccgtggtcgcgccacatcgctgctgctgtttgaacatgtacacggggaatcccgcgatcgcggtcaggcgatggttgacctgatggcacagtatgagcagcacggtttgcagctcgacagtcgcgaacttcccgatcatctgccgctgtatctggaataccttgcgcaattgccgaaaagcgaagcgttagggggtttacaggatatcgcgccgattctggcgctgctcagcgcacgtttgcaacagcgtgacagccgttatgcggtgctgttcgatctgctgttaaaactggcgaataccgttatcgacagcgataaagtggctgaaaaaattgcgaatgaagcacgtgatgataccccgcaggcgttggatgcggtctgggaagaagagcaggtgaaattcttcgccgatcaagggtgtggtgagtcggaaatctccgctcaccagcgtcgttttgccggggccgtggcaccgcaatatctgaatatcaccaccggaggacagcactaatgcacttcctgaatatgttcttctttgatatctacccgtacattgccggatcggtatttctgatcggtagctggttacgttacgactacggccagtacacctggcgggcggcttccagtcagatgctggatcgcaaaggaatgaacctggcgtcaaacctgttccacattgggattctgggtattttcgccggtcacttcctgggcatgttaacgccgcactggatgtatgaagcttttctgccggtcgacgtgaagcagaagatggcgatgattgccggcggcgcctgcggcgtgctgacactggttggcggtattttactgctcaagcgtcgtctgtttagcccacgtgtccgcgccaccactaccggcgcagatattttgattctctcgctgctggtgattcagtgcgcgctgggcctgctgaccattccgttttccgcccagcatatggacgggagtgaaatgatgaagctggtcgggtgggcgcagtcagttgtgaccttccacggtggcgcatccgcacatctggacggtgtggcctttatcttccgtatgcacctggtactggggatgacgctgttcctgttattcccattctcgcgcctggtgcatatctggagcgtgccggtcgagtacctgacccgcaaataccagattgttcgtgcacgtcactgattttctctcgatgccctaaactccgcttcggcggagtttttttatggctgtttgccggagtgcggcataaatgccttatcgaccgccgccttgtttcgtttacagcggatctgccatgtctggcatctgaatccggactctttgtttctgagtttattcagcatctgtgcgagttttttgtaagcagaaaaaggatgatgcagcatataatcacgccataaacgacaataaggatagttgtatgcgtttttcatcaattttcaaaataataatattaaatatatttatttcaaaaatggctcactctgctgtctgcgaggagcgctatccccccgactcagaagaatgccagtacgttcaggaattagagcaaaaagcggaacaaggagatgaaagcgcgcagttcgcgcttggaagctggtatgcggaggggcgatatgttaagcctgattataaactagccataaaatggctggagaaagcgggtaaacaaggttctgatttttcctatttcatccttggctatcattacaactatggtgaaaattttccacttagtcgacaaaaagcgctggagtggtatcgcaaggcggcagagctaggggatagtagtacgcaagaaatcctcggtgacgcctatatgtatggcgatgggtttccccaaaatacccagctagcgctggagtggtatcgaaaagccgcctctccaaccaatgatgcgggcgttgtccgcggccagggttcagcttcgtcagcacaatttaagcttggagtaatgtacgcccacggtcagggcgtccctcaggattatcagcaaacggcgatcttgatgcgtaaagcggcggaaaatatgtactaccccgcgcaactttatctcggtgttgcctatttttatggtgaaggcgtgcctcaggattatcgtcaggcagtttactggcttaatgaaggtataccaagcagctatacgccaggccacattccgctgaatgcgctctatgataaagcgcatcccgctgaccaggttcactctcagacgtggtatcgaaaaacagcgcaacgcgtgatggcaaaggtacagtacaattttggcgtatggtattacaacggttatcacttattgaaagatcacaacctggcgctggagtggtatcgcagagccgcagcgcaaggattggccgaggcgcaggatgcgatcggcgtgatgtttatgcagggtgagggcgtatctcaggactaccaacaggcgctggcgtggtatcgcaaagccgcacgccagggactgcctgctgcgcaaacgcatctgggcatcatgtctgcttttggtcgcggcgtcgcgcaaagcgacagacaggctatcgcatggtatcgaaaagcagcaaaacaggattttgcgaaagcgcaatatcagcttggcgtagcatatagcacgggaagaggcgtgcctgaaaatagccggaatgcgctgaagtggtaccttaaagcggcagagcaggggtttactccggcacaattagcgcttggggaaatttatgctcatgggcgccagggggtgcctaaagataataagcaggcctatatttggtattacatggcaagtatatatacggaaaaatctaaggatgattgttcagcgctcattgccgaaagaaaccgactcaagggaacgcttaccccagatcaacttagcgagacatatgccgcctttgatctcatcaggcgaaaaatcaaccagtcaaaggaggcgaaaaagattgccaggaagaagtattgataagatagccaataagctatggcgccatggtgtgaagtctgcctgtggggtaaggatacggggcagtgctgattgatttgaaattggtgccttatgaagtcatggtggtgggggaaggatgactcagcgctgcgcgtttcgcccttcgggtcgttgcctgcggcaacgctttctcgctttcgctcgaatcgaaccttagtcgaagcttctcatccttcccgtacagagagatatgagacactatgcttaacggggataagatacgcgacgggagtgatggtggtgggggaaggatgactcagcgctgcgcgcttcgcccttcgggtcgttgcctgcggcaacgctttctcgctgcgctcgaatcgaaccttaatcgaagcttctcatccttcccgtacggagagatatgagacactgtgcttaacggggataagatacgcgacggaagtgatggtggtgggggaaggatgactcagcgctgcgcgcttcgcccttcgggtcgttgcctgcggcaacgctttctcgctgacgctcgaatcgaaccttagtcgaagcttctcatccttcccgtacagagagatataaggcactgtgcttagcggggataagatacgcgacgggagtgatggtggtgggggaaggattcgaaccttcgaagtcgatgacggcagatttacagtctgctccctttggccgctcgggaaccccaccaggggtaattcaaattgtaggtaaagcttgaagatggtggtgggggaaggattattcgtcgcttcgctcctcaccctacgggccgttgccgttggcaacgttctctcgctttcgctcgagtcgaaccttaatcgagggttctcacccttccccgacaagtgcagacttctgcattgctcatcgagttaactacatcgctgtagtgaataatggtggtgggggaaggattcgaaccttcgaagtcgatgacggcagatttacagtctgctccctttggccgctcgggaaccccaccacgggataaattcattatgctgcttgcattctatagcgggaaggattattcggagctaaagctcctcacccttcgggccgttgcctgcggcaacgttctctcactattgctcgagtcgaaccttgaagtcgatgacggcagatttgcagtcagctcccttatgatcgctcgggaaccccaccacggggtaatgcttaatactggcccgcttccttttgggaagcggggcgcatcatatcaaatgacacgccgctgtaaagcattcctttgcctgaaatgaactgtttgcgtacttttcatccgtaacggattaaagctaatcaattcatattactgacgattaaagaataatcgtccgattgccgtaaacaaagactcgctgtgccagaacctgatacagcgcgcggcttaatacgtttttctcaacgtcgcgcccggcacgcatcatatcttctgcggtgtaggtgtgatcgacgtgaatcacgtcctgcataatgattgggccttcatccagattatcattcacatagtgcgcggtagcgccgatgattttcacgccgcgctcataggcctgatgataaggacgcgcgccgataaacgccggcaggaatgagtggtggatattgataattttgttcgggaagcgcgccacaaaacctggcgtcaaaacacgcatatacttggccagcactacatagtccggttgatgggcatcaatggcgtccgccatcttcgtgtcatgctcttcacgcgttaatccctcatggctgaccagttcgaaagggatctcaaaacgttcaaccagcgagcgtaacgtttcatggttgccaatgaccgcggcgatttcaacatccagcccgccatagttggctttcatcagcaggtcgcccagacaatgcgcctctttggtaaccagaatcactacccgacggcgtccggcgggattgagttcacgaacagagccttccggtaaggcgctatccagatcggccaggagagtggaatcattgaagatgccttccagctcggtccgcataaaaaagcgtccggtgcgatggtccacaaattcattgttttgcacaatattaagctcgtgcttatagcaaatgttggtaatccgcgcgataaggcctttttgatcgggacaaatagtacgcagaactttacgttgtagtgattgcattgccggaaaaatcctgttgagagtgtttgctgtatcgatactgtcaggcgtcactggccgcagcactttttaaattttttgcctgaaccgcacgggcagggatcatttcgacccaactgcgggcgggtaccgtcaatataataccactgaccgttttctttgataaaacgagaacgttcgataatcgccccggttttcccttgttcggaaaaacgcgcgataaaactaacataccctgtattttctgcttctgaccaggtatgttcaaaaatagtcaggccgagccacctggtattggcaaatccggcgatgatatcatcacgaaacgcggccgcattgcaggttggatgccagctcttaattaagtaatctgcgtctttcatcacaaaagcgcagtaacgagagcgcatgagatgtgacggatcgggtgctactcgttctccggacacaatacgaccacaacataggctatactcgtcagcgctaccacagggacaaggctgagacacaataatctccctgaatataaaaaacggcgttgaacgccagggtggcattatgttaactgagcagtggcgatgttgctacgtcttgaagccaggggaagtcgttaagtacgatgagaaaaatgaaaatagggctggcgctgggatctggcgcagcgagaggatggtctcatattggggtcatcaaagccctcaagcaaacaggcattgatattgatatcgttgcaggatgctcaataggttcgctggtcggcgccgcgtatgcctgtaataaattatcggcgcttgaacagtgggtatgttcattccgctactgggatgttttacgcctgatggatgtatcctggggcagaggagggttgcttcgcggcgaacgcgtatttaatcactatcgggatattatgcccgtcacggattttgaccactgttcaagacgttttggcgcggtcgcgacgaatcttagcacgggacgagagctatggtttactgaaggcgatctacaccttgctgtacgcgcgtcgtgcagtatgccagggctgatgtctccggttgagcataacggttactggctggtagatggcgcagtcgttaatccggtacctgtttcgttaaccagggcgctgggggctgatatcgttattgcggtagacctgcaacatgatgcccacctcatgcagcaagatttgctctctgtaaatgtcgggaatatcaatgaagagagcgatgatgcgctgccctggcataagcgtttaaaagaacgtttcagtagcctgacttcacgccgtggcgtgagttcgcctggggcaatggaaatcatgacaacctccatccaggtgttggaaaatcgtcttaaacgtaaccgtatggctggcgatccgcctgatattctcattcaaccattctgtccgcaaatctcaacgctggattttcatcgcgcccatgccgctattgcggcgggtcagttagccgtagagaaaaagatggacgaacttatacccttggtgcgtaccgacgtttaatgtaccttttacgatcacttaagcaaattctgacaggcgcaagcggcaataccatgccactattgattaaagccagtcaggggagagaacatgacgcagccattggtcggaaaacagattcttattgttgaagacgagcctgtatttcgctcgcttctggattcgtggttttcctctttgggagcgacaacggcattggcaggcgacggggtagatgccctggagttgatggggcgttttacccctgatctcatgatatgtgatatcgctatgccgagaatgaacggtctcaaactggtagaaaacttacgtaatcgcggagaccagacgcctattctggttatttccgcaacagaaaatatggcggatatcgccaaagcgttacgccttggggttgaagatgtcttgctgaagccggtaaaagatctcaaccgcttgcgggaaaccgtattcgcttgcttgtaccctaatatgtttaactcgcgggttgaagaagaagaacgcctgtttcgtgactgggatgcaatggtgagtaatccgaccgccgcagcgcaattgttgcaggaattgcagcccccggtacagcaggtgatttctcattgccgcattaattaccggcagctcgtctccgccgatcagcctggactggtgctggatattgcgccgctatctgataacgaactggcattttattgcctggatgtcacccgggcgggcgataacggcgtgttagccgcattgttgctgcgggcgctatttaacggcttattgcaggatcagctcggccaacaaaagcaccgtttaccggagttaggcgcgctattaaaacaggtaaatcatctgctcagacaagccaatttacctgggcaattcccgctatttgtcggctactatcacagtgagctcaaaaatttgattctcgtctccgccggattgaacgccaccttaaatacgggcgctcatcaggttcaaattagcagcggcgtgccgctaggaacattgggtaacgcctaccttaaccaattaagccagcgttgcgactcgtggcagtgtcaaatatggggcgcaggagggcgtctgcgattgatgttgtctgcggaatgaccaaacggaagagtgagcggaaattgctttaccggcctttcccgacgagtgttactatctgcggcagatttataagtatttgtcttaattataccaatataagtcctttttggacctgaggcttgttctggtactgatatactggaacacgatacagattaatgaacacgttcaatacatgaacagtccaggagaattttaaatggctgcccttaattcgaaagtcaaaaaagccgttatcccggtcgcgggattgggaaccaggatgctgccagcgaccaaagctatcccgaaagagatgctgccgctggttgataagccattaattcagtacgtcgtgaacgaatgtatcgctgctggcattactgaaatcgtgcttgttacgcactcgtctaaaaactctattgaaaaccactttgataccagttttgagctggaagcgatgctggaaaaacgcgttaagcgtcagcttctggaggaggttcagtctatttgccctccgcatgtcactattatgcaggtacgtcaagggctggcaaaaggcctgggccatgccgtattgtgcgcgcatcccgttgtcggaaacgaacctgtcgctgttattctgccagacgttattcttgacgaatatgagtccgacctgtctcaggataacctggctgaaatgatccgccgtttcgatgaaaccggcaatagccagattatggttgagccagtagaagatgtgactgcatacggcgtggtcgattgtaaaggcgttgagctggcaccgggcgaaagtgtgccgatggttggcgtggttgaaaaaccaaaagcggatgtcgcgccgtctaaccttgcgattgtcgggcgttatgtgttgagcgcggatatctgggcgttgctggcgaaaacccctccgggcgccggggatgaaattcagttgaccgatgctatcgatatgctgatcgaaaaagaaacggttgaagcctaccacatgaagggtaaaagccatgactgtggtaataagttaggatatatgcaggcattcgttgaatatggcatccgtcataattcgctgggtgctgaatttaaagcctggcttgaagaagaaatgggtattaagaagtaacgatacgttataaattttttaacagaagcgctggtaaatccggcgctttttttatgcctggggtcgtcagcggagaactcaggcaaaaaaaatcccgccagcggcgggattttaagcatccaggaagtaaattattccttgatcaggaaatcttccagttgcttaccttgttcttccattgcttttttgattacagccggtgtacgaccctggccagtccaggttttagtttcaccgttttcgtcaacatagctatatttagccggacgagctgcgcgtttagctttggtaccggatttagcggcagccatgctattcagcagttcattcgggtcaatgccgtcggcaattaacatttcacgatactgttgcagtttacgagtgcgttcttccacttcagcagcagcagcgctttcttcttcacgacgctcattaacgacaacttctaatttttccagcatttcttcaagcgtttccagagtacattctcttgcctgcgcacgaagagtacggatgttgttcagaattttaagtgcttcgctcattgtagtaatctcaaacttatattggggtggtttgttgagctaataatagagcgataaattcagttgtgcaatagccaggaatgtaaggaattcaaaattacgctttattaagcacacgttttaattatctcaacttaaattttccttgaggcgccgcacaaaaaagagcttattggcaggggggatactcaccgtctgtcgctaaaaatttaggagtcaggtcacattttatcatgatgaaatacgatctcattgctgagatatcaatctcttgtattagatttccttacaagaaaaccctattactttgcaccgggtatgagtaacggtaacaataagtacaaggttttcatattggcgggtgatgataagcattgttgatgaattttaacggcataatttgtgaaggaatgtgtatatacccttcatacttcaagttgcttatgcgttggctacgctcgctcactccagtcacatagttatctatgctcctagggactcactcccttgccgcctttaagcaacgcgaattattttgggtatagtgagcgatgtttgtacaattcttaatactcaccggagcgcgagccgcgccgtcgcgtcggtaaattatggtacaatcccgccaatctttatttcactcaggtgaggtcctgcgaccaatggcacagctatatttctactattcggcaatgaatgcgggtaagtcgactgcactgctgcaatcttcatacaattatcaggaacgcgggatgcgtaccgtcgtatatacggcggaaatcgacgatcgtttcggcgcaggcaaagtcagctctcgtatcggtttgtcgtcgccggcaaaattgtttaaccaaaatacatccttgtttgaagagattcgtgccgagagcgcgcggcagacaatacattgcgtgttagtcgacgaaagccagtttttgactcgccagcaggtttatcaattatccgaggttgtcgacaaattagatattccagtactttgctatgggctacgaacagactttcgtggggagctctttgtcggcagccaatacttgctggcatggtcagataagctggtggaattaaaaactatctgtttctgcggtcgtaaagccagtatggttctgcgccttgatcaggacggcaggccttataacgaaggcgaacaggtggttattggcgggaatgaacgctacgtttcagtttgccgtaagcattataaggacgcgctggaggaggactcactgacggcgattcaggagcgtcatcggcacatatgatacctgaggtaaagatcggcttataaaacgccctgtagcgctttggaggtcattattcaggcctcctgacgaagggcgtgccgtgagcacgtaggccagatgatcagcatagcgccttcaggcatcagataaacaggtaaaacaaaaaaacggcctcaattgaggccgttattgtcatgctaaaacagataacgaattaagcggattttttcgcttttttctctgctttcggtgcggcaacgacgtctttcttcgctgcaacttcaccttcggtgaaatcacgaccgtagtaggtatccagcagaatctgtttcagttcggagatcagtggataacgcgggttagcgccggtgcactggtcatcgaaggcatcttcagacagtttgtcaacgtgtgccaggaagtcagcttcctgcacgcctgcttcacggatagacttaggaatacccagctcagctttaatgctttccagccatgccagcagtttttcaatcttagcggcggtacggtcgcccggcgcgctcaggcccaggtggtcagcaatttcagcgtaacgacggcgtgcctgcggacgatcgtactggctgaaagcggtctgcttggtcgggttgtcattcgcgttgtagcggataacgttacaaatcagcagggcgttcgccagaccgtgcggaatgtggaactgagagcccagtttgtgcgccatggagtgacatacaccgaggaaggcgttggcaaacgcgataccggcgatagtcgctgcactgtgaacacgttcacgcgcaaccgggtttttagacccttcgtggtaagacgccggcaggttttctttcagcagtttcagagcctgaagagcctgaccgtcagagaactcagaagccagtacggaaacgtaagcttccagggcgtgagttaccgcatccagaccaccgaacgcacacagggacttcggcatatccatcaccaggttggcgtcgacaatcgccatatccggggtcagggcgtagtcagccagcggatatttctgaccggttgcatcgtcggtcacaaccgcaaacggtgtgacttcagaaccggtaccggaagtggtggtgacggcgatcattttcgctttcacgcccattttcgggaacttgtagatacgtttacggatgtccataaagcgcagcgccagctcttcgaagtgagtttccggatgttcgtacatgacccacatgattttcgcggcgtccatcggggaaccgccgcccagcgcgatgatcacgtctggtttgaaggagttcgccagctcagcgcctttgcgcacaacgctcagagtcgggtcggcttcaacttcgaagaagacttcggtttcaacgccagccgctttcagcacagaggtgatctggtctgcatagccgttgttgaacaggaagcggtcagtcacgatgagcgcacgtttgtggccatcagtaatcacttcatccagcgcgatgggcagagagccacggcggaagtagatagatttcggaagtttgtgccacaacatgttttcagctcgcttagcaacggttttcttgttgatcaggtgtttcggaccaacgttttcagagatggagttaccaccccaggaaccacaacccaacgtcagggaaggtgcgagtttgaagttgtacaggtcaccgataccaccctgagaggccggggtgttgatcaggatacgcgcggttttcatcatctgaccgaagtaagcaacgcgttctggctggttatcctggtcagtgtacaggcaggaggtgtgaccgataccgcccatagcgaccagtttttctgctttttctaccgcttcttcgaaatctttcgcacggtacatcgccagagtcggagacagtttttcgtgtgcgaacggttcgctttcatcaacgaccgtaacttcaccgatcagaatcttggtggtttctggtacggagaagcctgccagttcagcaattttgtaggctggctgaccgacgatagcggcgttcagagcgccatttttcaggataacgttttgaaccgctttcagctcctggccctgcagcatgtagccgccgtggctggcgaaacgttcgcgaacggcatcatagacggaatcaacaacgacaacagactgttcagaagcacagattacgccgttatcaaaggttttagacatcagaacagacgccacagcgcgtttgatatccgcagtttcatcaatgacaaccggagtgttgcctgcgcctacgccgatagccggtttaccggagctgtatgcagctttaaccatgcctggaccgccagtggcgaggatcaggttaatatccgggtggtgcatcaacgcgttagacagttctacggaaggttgatcgatccagccaatcagatctttcggcgcgccggcagcgatagccgcttgcagaacgatgtctgccgctttgttggttgcttctttagcacgcggatgcggagaaaagatgatggcgttacgggtcttcaggctaatcagcgatttgaagatcgcggtagaggtcgggttagtggttggaacgataccgcaaataatgccgataggttcggcaatggtgatggtcccgaaggtgtcgtcttcagacagcacaccgcaggttttttcatctttataagcattgtaaatatattcagaagcgaagtggtttttaatcactttgtcttccacgatgcccataccggattcggcgacggccattttggccagcggaatgcgggcatcagcggctgccagagcggcggcgcggaagattttgtcgacctgttcttgagtgaaactggcatattcacgctgggctttttttacacgctctacgagtgcgttaagttcagcgacattagtaacagccataatgctctcctgataatgttaaacttttttagtaaatcatctgcgcgatacgtgagtatagacagatcgacgatactttgtataaatgcctgaaattcaggtggttacttaacgtccgtttcgctctgatttactaaaagagcttctgcgttagtatcatttaactctaacgcgttacgtccaggtggcgtaagcaagattactcacttctgagtagcgattgtgtgatctaaatcaagattacgcaaagctgacacctttcagcaggccattttagccttttatgtaaattgttaagaaatcgttgtcatgaagagtaagtggattagcataacgagtacatataaataacagcgatgaatggatgaaattaggtgtagataagaggtgaactatgcgaataaaaggcgtatcttctgcgcgttttgatcattaacgaacattgacttcatccggctaacgcttcggagctaaccgtgattcaaccgctttttgattttcctgtttactttaagttctttatcgggctctttgcgctggttaacccggtggggattatccccgttttcatcagcatgaccagctaccagacggccacggcgcgtaataaaactaacctcaccgcgaatctgtcggttgcgattatcttgtggagttccttattcctcggcgatggcatcctgcagctgtttggtatttctattgactcgttcagaattgcgggcggtatcctggttgtcaccattgcaatgtcgatgatcagcgggaagctgggggaagataaacaaaacaagcaagaaaagtcagagacggccatacgcgagagcattggcgttgtgccgttagcgctgccgttaatggcggggccaggggcgatcagctccactatcgtctgggggacgcgttatcacagcatcgcgcatttgcttggtttttcagttgccattgcgctttttgcgctttgctgctggggcgtgttccgtatggcgccgtggctggttcgtttgctggggcaaaccggtatcaacgttattacccgaatcatggggttgttgttaatggcgctcggcatcgaatttattgtcacaggaataaaaggcattttccccggcttgctcaactaaactcccacctgctgatttacaggcggcgccctaaggggccgccttgtgacattcccacgtaacacttcttactttgataagcattcagcgtttaaatgataaaaatactaatataatctaacgctatttatttttattaatcaaactattatcaacattactgagaccgtgagaagcggtaggtctgttattttattcacaccatactctggggcttgatgaaggattattgaaatgttattagttgtttcagctccatcgtagatgaatgtgctaaataatgagcatttgttaaatttgtgtgtgttttctggcgcaggcataacctacgatgcgacagagagatatttttctttcaacttattgattataaagaataaatcaaagatttttaacattgtttaactgtttttttgggcagggatttttccataaaagagaattggttaacaaaattgtaaaatgaattggcggttcagaaacgcatttgatacttttcggccaaacatttttgtagaagatttcacattgttgataactattttcatttagatggttgtcagaaataacgtgcgacgtgggcaggtacgtcgtataccgaatcgacgaaaggcgatcgaacgaatcgtcagaataaataaagtcggtgatagcaaaagcagtgacagacctggcagtacaccaccagtgctgtacaggaaccctgacgggattaaacaggctggtaaaaaccagtaattataatgagtggagtacaaacacaatgtctaacatcacgaaaaaaagtttaattgcagtgggaatactcactgcgctcatcgccgccagcgccgcgactgcggcagacgtgcccgccggtgttcagttagccgacaagcaaacgttggtacgtaataatggatcagaagtgcagtctctcgacccgcataaaattgaaggcgtgccggaatcgaacgttagccgtgatctctttgaaggcttattaattagtgatgtcgaggggcatccttcaccgggcgtcgcggaaaaatgggagaataaagattttaaagtctggacattccatctacgtgaaaatgcgaaatggtcagatggtacgcccgtcactgcccatgatttcgtttatagctggcaacgcctggccgatcctaatacggcatcgccgtacgccagctatctgcaatacggtcatatcgctaatatcgatgacattatcgccggtaaaaaacccgccaccgatctgggggtaaaagcgcttgatgatcacacctttgaagtgaccttaagtgagccggtgccttatttctacaaattgttggtccacccttcagtgtctcctgtaccgaaatcagcggtcgaaaaatttggcgataagtggacacaaccggccaatattgtcactaacggcgcttataagttaaaaaactgggtggtgaacgaacgtatcgtgctggagcgtaacccgcaatactgggataacgacaaaaccgtcatcaatcaggtaacttatttgcctatctcttcggaggtgacggatgtcaaccgctaccgcagcggcgagatcgatatgacttataacaatatgccgatcgaattattccagaaactgaaaaaagagatcccgaatgaagtccgcgtagacccttatttgtgtacctattattacgaaattaataatcaaaaagcgccgtttaacgatgtccgcgtgcgtaccgcgctgaaactggcgttagatcgcgacattattgttaataaggttaaaaatcagggcgatttacccgcttatagctacacgccgccgtataccgatggcgcaaaactggtagagcctgagtggttcaaatggtcccagcaaaagcgtaatgaagaagcgaagaaattgttggctgaagccggctttacggcggataagcccttaacattcgacctgctgtataacacctccgatctgcataaaaaactggccattgccgtggcgtctatctggaagaaaaatctgggcgtcaatgtgaatctggagaatcaggaatggaaaaccttcctggatacccgtcatcagggcacctttgatgttgccagagccgggtggtgcgcagattataatgaaccgacctcattcctgaatactatgttgtccgacagttcaaataacaccgcgcattataatagcccggcgtttgataagctgattgctgacacgctgaaagtggcggacgatacgcagcgcagcgaactctacgctaaagcggagcagcagttagataaagactcggctattgtgccggtgtattactacgttaacgcgcgcctggtgaaaccttgggtgggcgggtataccggtaaagacccgctggataatatttatgtgaaaaacttatatattatcaaacattaatggcaagacatgggacaactgcggttgtcccatggtgtcttttttcatcgcactataactttccctggcggatcttttgtcacgtccgggaagtaaaggcacaggccagaaggtacgggcaatgttgaaatttattttacgccgctgtctggaagcgattccgacgctgtttattcttattaccatctctttctttatgatgcgcctcgcgccgggtagcccttttactggcgagcgcgcattgccgccggaagtgctggccaatattgaagcaaaatatcatctgaacgatcccatcatgacgcagtacttcagctacctgaagcagctggcgcatggcgattttggaccatcgtttaaatacaaagattacacggtcaacgatctggttgccgccagcttccccgtttcggcgaaacttggcgctgccgcttttttgctggcggtcattattggtgtcagtgctggcgtgattgccgcgctaaagcaaaatacgcgatgggattatacggtgatgggatttgccatgaccggcgtcgttatccccagttttgtggtagcgccgctactggtgatggtctttgcaataaccttgcaatggctgcctggcggcggctggaacggcggggcgttaaaatttatgatcctgccgatggtcgcgctttcactggcctatattgccagcatcgctcgtattacgcgcggctcaatgattgaagttctgcattcgaactttattcgtaccgcgcgggcaaaaggattaccgatgcgcagaatcatcttccgccatgcgttaaaacctgcgctgctgccggttttatcctatatggggccagcctttgtcggcattattaccggctcaatggtgattgaaactatttatggcttaccgggcattgggcagcttttcgttaatggcgcgctcaaccgcgattactcgctggtgttaagtttgaccattctggtcggggcgctgaccatattatttaacgccattgtcgatgtgctctatgccgttatcgacccgaaaattcgctattgatactggagctcgcgatgatgttaagtaagaaaaacagcgagacgctggaaaatttcagtgaaaagctggaggtggaaggtcgcagcctttggcaagatgcccgtcggcgctttatgcataaccgtgcggcggtggccagtcttattgtcctgtttctgatagccctgttcgtgacagtggcgcctatgctgtcgcaatttacctatttcgataccgactggggcatgatgtccagtgcgccggatatggcgtccggtcactatttcggcactgactcttccgggcgcgatctgttggtgcgcgttgccatcggcgggcgtatctcattaatggtcgggattgccgccgcgctggtggcggtcattgtcggaacgctgtatggctcgctgtccggctatctgggcggcaaaattgattctgtgatgatgcgtttgttggagatcctcaactcgttcccgtttatgttctttgtgattttgctggtgacgttttttgggcagaacattctgttgattttcgtcgccatcggcatggtctcctggcttgatatggcgcgtatcgtgcgtggccaaaccctaagtcttaaacgtaaagaattcatcgaagccgcgcaggtgggtggtgtgtcgactgccagcattgtgatccgccatattgtgcctaacgtcctgggcgtagtggtagtgtatgcatcgttgctggtgcccagcatgattctgtttgagtctttcctcagtttcctggggcttgggacgcaggaaccgttaagcagttggggagcgttattgagcgatggcgcaaattcaatggaagtctcaccgtggctgctgctgtttccggctggctttctcgtggtgacgttattctgttttaactttattggcgatggcctgcgtgatgccctcgacccgaaagatcgttaaggagtacagccatgagcttatcagaaaccgcaactcaggcgccgcaaccggcgaatgtactgctggaggtaaacgatcttcgtgttacgttcgctacgcctgatggcgatgtgacggcggtcaacgatctgaactttacgcttcgcgctggagaaacgttaggtattgttggcgagtctggatcggggaaatcgcaaacggcgttcgcattaatgggactgctggcgacgaatggtcgaatcggcggttctgcgaccttcaacggacgtgaaattcttaatctacctgagcgcgaactgaatacgctgcgcgcagaacagatttcgatgatttttcaggacccgatgacctcgctaaatccttatatgcgcgttggggagcagttaatggaagtcctgatgctgcataaagggatgagcaaagcggaagcttttgaagagtccgtcagaatgctggatgccgtaaaaatgccggaagcgcgcaaacggatgaaaatgtacccgcacgaattttccggcggaatgcgtcaacgtgtgatgattgcgatggcgctgttgtgcaggccgaaactgcttattgccgatgagcctaccaccgcgcttgatgttaccgtgcaggcgcagattatgaccttgcttaatgagctaaagcgcgaatttaataccgccattatcatgattacccacgatctgggcgtggtcgcgggtatttgcgataaggtcctggtaatgtatgccgggcgtaccatggaatacggtaaggcgcgcgatgtcttttatcagcccgttcatccgtattcgataggcttgcttaatgcggtgccgcgtctggatagcgagggggcggaaatgttgacgattccgggcaatcctcccaatttattgcgtttgcctaaaggttgtccgttccagccgcgttgtcctcatgcgatggagatctgcaataatgcgccgccacttgaagcgtttagtcctggtcgcttgcgcgcctgttttaaaccggtggaggaactgctatgaatgctgtgattgaacaacgtaaagttctcctcgaaatcgccgatctgaaagtacattttgatatcaaagaagggaagcagtggttctggcaaccgccgaaaactctgaaagcggtggacggcgttacgctacgcctgtatgaaggcgaaacgcttggcgtggtgggtgaatccggctgcggcaagtcgacgtttgcgcgcgccattattggtctggtgaaggcgacagacggtaaagtcgcctggctgggaaaagatctgttgggcatgaaagcggatgagtggcgcgaagtgcgcagcgatatccagatgattttccaggacccgctggcgtcactcaacccgcgaatgacgattggcgaaattatcgcggaaccgctgcgcacttatcatcctaaactttcgcgccaggacgtgcgtgaccgcgtgaaagccatgatgctgaaagtggggctgctgccgaatctcatcaaccgttatcctcatgaattttccggggggcagtgccagcgcatcggtatcgcccgggcgttgatcctggaacctaagctcattatttgcgatgagccggtgtcggcgctggacgtttctattcaggcgcaggtggtgaatttgctccagcagttacagcgagagatggggctgtcgttgatttttattgcgcacgacctggcggtcgtaaagcacatatccgatcgtgtcctggtgatgtatctcggtcatgcagtagaattgggcacctatgatgaggtgtaccataatccactgcatccttataccaaagcgctgatgtcggcggtaccgattcccgatcccgatctggagcgaaataagaagatacaattgctggagggcgaattaccttcgcccattaacccgccttccggctgcgtgttccgtacacgctgtccgctagccgggccagaatgcgcgcaaacgcgaccggtgctggaaggaagttttcgccatgccgtttcctgccttaaagtagacccgttataatcgcaagggctgacaatttgtcagcccttcttttaggtgaggttaccgtgtcactttctttgtcgtcggttcgccgtcgtctttatcataatctgttcgatttgactacgcgctcaggtcgccgttttgaagggttatgcgcgctgtttgcgctgcttagcgtactggtcatttttgttgaatcaggcgtgggaacggaatatcacctgacatttgatgaatggcatatttttgtctggctggagctctgcgttaccctgatatttaccggtgaatacttgctcagactgtttagctggcccgaaccggcaaaatacgtttttagtttctggggatttattgatctggtgacgattttgccgctgtacgtcatgtggctgtggccggaaattagcctgaactatatgtttgcctggcgtgctatgcgagcgattcgcgtgctgcgtattcttaaactgctacgctttatgccatccctgcgcgtattctggagcgccattattagcgcgcgtcatcagcttattctgttctattcatttattgcgatcgtgatgattattttcggtgccctgatgtatcttattgaaggaccgaaatatggcttcacgacgcttaatgcctcggtgtattgggcgatagtgacagtcacaaccgtggggtatggtgatattacgccgcatacgccgctgggacgtattgtcgcgtcggtgcttattttgattggttattcggtgattgcgattcctacaggactgattaccacgcacatgagcagcgcgtttcaaaaacgtcactggcagcgaaaatgtccgcagtgccagcaaagccagcatgaacatagcgcgcaatattgtaaccgatgcggcagtaagctaccggattaaacaggcttgccggagggcgcaatcagacgccatccggcctgaaccgcttattcgcgccagagaatatggcacagcttgtggtccttttcccggcacagcagaacgcgggcgaaaatgtcgttaatttcgccgtcttcggtatccgctaggccaatcactacctcggcaaaaaagtctggattcaggtcaaaatcgacgtgctcttgccagtcttcagcgggatcaaacaactccgcgccgccgcgctcctcgaattgcaaattgaacagaatgatatcagccggatcaagattatccgccgccagctcaagaaaaatatcgtaagcctgctcaagcgtttcgtcttcagtcaggcgattgttcagatccatttccatagtgactacctgtttactcatgttggtcacgttttacagcaatggactaaagaagtaaaacaatcgctcggtaatacgctgccataacggacgttttacccacaaacgcgcatctaagagacgggagcgcgaaatataatcgtcctgtaccgcagccagatcggcgccgaaacccgtatcatcaatgaccagcgtaatctcgaaattaagccacaggctacgcatgtcgagattcacggtaccgaccaggctcagttcgccatcgaccagcacgcttttagtatgcaacagcccgccttcgaactgatagattttcacgcccgccgccagtaactcgctgaaaaaggcgcgactggcccagccgacgagcagtgaatcatttttacggggcaggataatactgacatccacgccgcgctgcgcagcggtacaaatggcgtgcagcagatcgtcgctggggacgaaatatggcgtggtcataattaaatattcgcgcgcagcataggtggcggttaatagtgcctggtgaatgagatcttccggaaaaccaggaccggaagcaatggtatgaatggtatgcccgctggcctgctcaaacggcataatattcacatccggcgggggaggcagaatgcgtttacccgtctcgatttcccaatcgcaggagtaaacaatccccattgctgtcgccacggggccttccatccgcgccatcaaatcgacccattgtccaacgccggcatcctgtttgaaaaaacgcgggtccaccatattcatactgccggtataggcgatgtaattgtcaatcatcaccattttacggtgctggcgaagatccatacggcgtaaaaagacgcgcatcagattcaccttcagcgcctctacgacttcaatgccagcgttacgcatcatggccgcccaggggctgcggaagaaagcgacgctacccgcggaatccagcataagccggcaatggatgccgcggcgggcggcggccattagcgattcagcgacctgatccgccatgccgcctggctgccagatgtaaaacaccatttcgatattatgccgcgccagttggatatcgcgaataagcgcctgcatgacatcatcggagtcggtaagtaattgcaactggttgcctttgacgcccgcaatcccctgacgtcgttcgcacagcttaaacaaggacgatgcgacgctactgttttcttgcgcgaaaatgtgtttgcaggctttgaggtcattcaaccatttggcagtagatggccacatggcgcgggcacgctcggcgcgacgtttgcctaaatgcaattcgcccacggacaaataggcgatgatcccgaccagcggaaggatatagatgattaacaaccaggccattgcggagggaactgcgcgccgtttcattagaatacgtaatgtgacgccggcaatgagaacccagtatcccaaaatgaccagccaactcaccacggtgtagaaggttgtcataactttaaaaatcctttagaaagcgtgttgttaagagtttacgcgtcaggattcacatggcaaataaaaacacgggaaaagcgctggtctgcatccggcgagggggtataatggcgcttctgttacagtgagagtcgtaaacatgaagcgtagtagaacggaagtggggcgctggcgaatgctacgtcaggcgagccgccgtaaagcgcgttggcttgaagggcaatcacgccgtaatatgcgtatccatactatcaggaaatgcatctttaatcgtcagcgtaattcattactctttgcgattcacggtgtgtgagccagaaagggcaccgtatgcggtgcccaacaggccatccttttcaaaagatcttcttatacggtttgaccgaaacctgcgcatagacgcccgctgcgacgtagggatccgcatcagcccaggattgcgctgcttctaaagattcaaattcagcaatcaccgttgacccggtaaatccggctaccccaggatcgttactgtccactgcgggcatcggcccggcagttaataatcgcccttcatcatgcagaagttgcaggcgcgccagatgcgcgggccgtaccgagaggcgtttttcaagcgagttggcattatcctgagcgtaaataacatacagcacgggtagagctccttaatcggtaaaagttgctgattacgttattggaaagggcatttaactgcaatgtaaagataccgactttgttaaacatgcacattttgtgtggtgtttttgcgcgatatcatcttttaaatgccgctatcggcaatgccttattgaatatgattgctatttgcatttaaaattcagctctggtttttcaactgaaacgattatgacttcaatgacccttgatttacctcgtcgctttccctggccgacactcctttccgtaggcattcatggtgctgtagtggcaggtttgctctatacctcggtacatcaggttattgaattgcctgcgccagcgcagcctatcacggtgacaatggtttcacccgctgacctggagccgccccaggcggttcagccgccgccggagccagtggttgaacccgaaccggagccagagccgatccctgaaccgcctaaagaagcgcccgtggtgattgagaaacccaaacctaagccaaaacccaagccaaaaccgaaaccggaaccggtgaaaaaggttgaagagcagccgaagcgcgaagtcaaaccagccgcgcctcgtcctgcctcaccgtttgaaaatagcgccccggcgcggccaacaagcagcaccgcctcggcgaccagcaagccggcggtgagcgtacccactggacctcgcgctctgagccgtaaccagccgcagtatccggcgcgagcacaggcgttacgtattgaaggccgcgtaaaggttaagtttgatgtgacctctgctgggcgagtggaaaatgtacagattctgtccgcgcagccagccaatatgtttgagcgtgaagttaagaatgcgatgcgtaaatggcgctatgaagcaggcaagccgggttccgggctggtggtcaatattatcttccgtctgaacggtacggcgcagattgagtaatctctggcgccgccagtaggaatataccatcacctgctggcggcgtaagcgggcatacttaaccctgaaccgggagcgggcgaggtttaccgtccggatcgacggcaacataaataaacagcgcctcggtggccttgtagcgctgtccaatcggttctgacgcgacttttttcacccagacttcaatattgatgctaatagacgtcgtaccgcgtttaacgcagcgcgcgtagcagcatacgacatcgccaaccgcgacggggcgcagaaatgtcattccttccacgcgtacggttacaacccgaccgtgcgcgatctctttggccagtatcgcgccgccaatatccatttgcgacatcagccagccgccaaaaatatcgccgttcgcattggtatcggcaggcatggccaatgtacgtaaaaccagctcgccctgaggagtattatccattgttgtcattgtaaaaccgactatcagaaaaaattacagccgcgatgctactatgaattttgtgtggagaatagtgggaataaaggtactgacgggaaagcgcagggcgtaaaggcgaagaaaatatcgccaggcgttcgcagtctggcgatgataagtcacgggagggttatgatttatcttcctgtggcagatgccggtagatatagacgccgctcagcagggtaaaaatgagcgtcagcgccgtgagtccaaagaccttaaagttgacccagatattttgcggcaaccagaaggcgatataaatgttagccagaccgcacgcaataaaaaacagcgcccacgccaggttcagctttgaccagacctgctgcggcaacgccagttctttacctaacatacgttggattaacggttttttcatcacccactggcttattaacagcgcgccggcgaacagcgcataaataaccgtcaccttccatttaataaattcatcgttatggaagaagagcgtcagaccgccgaagacggcaaccagaacaaaggtaatcagcgccatcttctctattttccgatagcgcacccagctataaatcagcacgattgccgtcgcgacaatcagtgcggaggtcgccgcatagatgtcataaagtttataaaacgcaaaaaagacaaccagcggtaaaaaatccagaaactgcttcattcttcgattccatcatcaacgagcgtcgaatgcgccgcgtaacggcgcattgcggattattggcgaatcaacatatacaggcggaataagtagataagcaatactgcggaaatcagattgctcaacgtattcgccagtacagcgcctacatttggggtcagtacagcgaagctgggcgcgaacagcaatagcaatgttttagccagtaaccagcctatcaccgcaggcgcgaccagtctcatgttagcccaggctaaacgcatactgctgcgcattgcggcaaacacgcccattttctcttcaaccaacatcactggcgcaagcgccagcacaatggccataataatccccggaacgacaatcagcattataccgatttgcactaacagggtagtcagaaaaatgagaataaacagtttaggcaatgcaggggcgctggcgccgatagcgcgcagcgcgctaacccgatgtcccgctgaaactaactgaatcatcaggatgataccgccggccagaatagcgttgccgataagcccggaaaacgtcgaggcggcagaggcgcgcaacaggatctgctgctgctccggcgtcatattttgtaccagctcaaacaggccagcgctgcctgccagatgttctccttcactgagttgcgcgatttgcgcatcgctgggtgaaaaggcatgacctaagaccaccgtgataaatgcgcacagcaacgaaaccagcaagatagtaataaattgatttcggaaaaaatttccggcgtcacggtaaacggacttcgccgtgatagacatgcactctccttgagttttgcaggtgttaatttgcgggcaattgtaccctggataactctacagtggcagcatcagcagttgtatggaaaagcatatctttgtaaagcggcggtaatccgtatcgcgcgcgggcgcgattacacgcctcattcacttcgcctccttcgcccgatatcgaaaattcgcgacaggttgaagggcggttttcataaatagcgcaactgacgttttcacccggcgtgccaattagcgctttacagtgcggctgtttttggttggtaccggccatacaacgtaaaaaaggggtaacaggctcggttaatgacgccggaacgcgtccgctggcatcgtcgccttcagcccaataaaaggagacacgaaaataggcacaacaggcaccgcatgtcatgcatgggttaagaacgctcatgattcacctgcaaaaaactcacgtatcaatagattacaacggaaattaatctgtcccgcagtgttcgcgaatcttaccgccacgcgccattgcgggacattgattaccttagccagcctttatcgccagggcaacaggagcagacaaatatttgcatagcgtgaatatgtcaaaattgatctgaactcctataaccaggattttcaatacaagttctaaattaatctggatcaataaatgttaaattataagaacaaatgtgatctgtgttagatcacttattacttcattgtgggtatattcatcacgcttttataaccataacgatggagcgggtatgaaaaaatttacagtggcggcactggcgttaacaactcttctctcaggcagcgctttcgcgcacgaagccggagaattctttatgcgtgcaggtccggcaaccgtcagacctacagaaggggcgggtggtacgctggggcatttaaacgggtttgatgtgagtaataacacgcaactcggcctgacattcacttacatggcgacggacaatatcggggttgaattgctggcggccacgccgttccgccataaggtgggtacgggcgcgacgggagatatcgccacggttcacctgttaccgccaacgttaatggcgcagtggtacttcggcgattccagcagcaaagtgcgtccttatgtcggcgtgggggtgaactacaccaccttcttcgataacgactttaacgataatggtaaaaatgccgggctgtccgatctgagctttaaggattcctggggcgcggcagggcaagttggggtagattacctgattaaccgcgactggttaattggcgcctctgtctggtacatggatattgatactaccgccaattataaaatgggcggcgttcagcatcatgacagcgtgcgtctggacccatgggtatttatgttctcggcaggctatcgtttctaatcgcgtgatgttgtgacgaaaaaagaccccgccaggcggggtcaaaaaaggacatgacacacggattttacttgtcggaactcacttgtcttctttcggttcgccgcagcctagttctgcgccagtgagaggatcaacggtggggtccgatttcgttctttctgccatcgctttgagcagcgccatctgctcgcgcggcaatttcactgtcgccaggccatcgccgccatcaacagcaggcatcggttctgcgacatagttgaagttctcatcgctattccagctacctcgcggatcgtcgccttgcgacatgttgtagtacacgtcggtatactgttctaccggcggtaatttacccggcgggaagttgttacgaatcgaatacagcgccttttcaaaagagagctggtgcgcgacttcacgggtcattaagaaactgagcgtgtcttttacgccgggatcgtcggtcagattaatcaggcgttcataaatgatcttcgctcgcgcctctgccgcgatgtttgagcgtagatcggctgtgacttcgccgatagtatcaatataagccgcggtccacggtacgccgccggagttcgtcaacgccgggccgccgccatacagcagagaggtgatatggctgtcattaccattctgcgtcagcgagcgataaagttccgcttcgttttcggtaccttccgccagctcgcctttagcgcctttattaagcattcctaccagtgagccgataatttccagatgactcagctcctcggtggcgatgtccattaacatttctctacgaccggcatcatcatcgcttaaaccttgcgtgaagtagcggcaggcggccgccagttcgccctgcgggccgccaaactgttccagcagcaggttcgctaatccaggattaggttcgctcactcgcacagtatattgaagttgttttacgtgtcgaaacatattgcctcctgcttattatttattttttggcttcaacgccatctgcttcagatcgcagtaaaaattgttccgttgtctgcggaatatgtttgatcagccagtcagccatttgcatttcttctttcagaatggcttcaatcgtcggaattgaggcagtgtcgccagctttttttgccgccgccagcagggaggtataacaagcaatttcgaactgctcgaaaacataaccgctaattgagcctttgacaatttcatcggaagggaacatgccaccgatagattgccccattgctgccattttactcatggagtctttcaacaccgaacgagaaatgccattacggtccaatacttcttcgagcatggtaatttgatgtttggtttcactaatatgttgttcaattctggcttttatatcaggataattttcaatacggctggccatagattcaagcatcgattctgcctgtttttccatggcatgggcgtcacgaagccagtcatgataatgttcagtataattcattttacattcctcaatgcgtgataatctgctccgataataaaatcggaatcatgcaagctgataattaaaaatattatttcgatttgcgttcagcacttttattaacattgctgactgctaaatcggtaagttttaaatcagtttgtttttcctcgtcgagggtttctttgagcagttttaatgccttgctatagccgagctgctcggccagggtggctagcgtgccgtagctggcgatttcgtaatgctcgactttttgcgccgcggcgataagcgctgcatcgcgtacttcgtttttctccgtactttcgatgacttcattggcttcttcgatcagcccttccatagcgacgcatttcattcttttcagtttaatgccagattcagattcgacgatctgatcaatacgttcaatctgaccctgggtttcttcaagatgagattgaaaggcctggcttaatttttcattggacgtggctctggctagtttagaaagagccttggttaattgtttttctgcactataggtatctgaaagtagatggataaaaaggtcttcaacggttttgatattcataaatctaattctcctgggcaaaatactgcgagccagaagactcgcagattgcttgataaaagcatgtgttgtatttacattacagtaaatcaggaattatcggatttacgtccgccgtgactattctgaccaccttttttaccggcttcagaagctcgttgcggatcgtttttgaaattcccgccgctatgctgaccgcctttgcggcccgcttcagatgctttttcacgattctcggcgaaatttcctgaaccaccacgatgttcggccatattatttctcctgtctcgttgcttgctgaaaaaatcggttttaaccgtgtcgacaccctattaaaattagttggttaaaccgattagtcaaattgacggaaatagttgtgatttaccgcgtaaataacgcacaaaaaatggtttagagataatatattctatattttcttttagaataagcgatttaacagaaaatgctttgcattgttattaataacaagcgtcactatctgcagccatagaaacgttaatgcattgtttgttgacatttctttacataaaggcgggggaaattgacgtgaaaacgctaaatttttcggcgtgattaggagttttcttagcaaaaattgacttcagactttttgaaagctggacggggaataacaccaaaaagattgatgatgtacatctgaatcgtgattctggttcggcgccagccactcattaagccgccagcgttatgctgacggcttaactcgttatgcgcggctggcggctttcatggctgagacaaaggacctgagctccgccaacatctgttcgggagacgcgaggtttttctcgataatcttgacaatggctgagccggagatagcgccagccgccccggcacgcacggccgcagacacctgttccggcgaggagataccgaagccctgtaacgcaggcgcggcatggtactctttaagcttctcaatgagatgatgcaacggcaatgcgccacggttttccgcgccggtgacgcccgaacgcgaaagcaggtaggtgtaaccgcggccgtaagatgcgacctggcgcagaagatcgtcatccgcatttggcgggcagatgaagatcggcgcgatattatgccgtaacgccgcctggcggaagggggccgactcttcaaccgggacatctgcgaccagcacggaatctacgccaacctgttcacaacgggcatagaacgcatctatgccgttattgaacaccagattcgcgtacattagcaggccaatcggaatggtcgggtgtttttcacgaatcagcgccagcatttcaaaacactgagccggcgtgacgccagcggcgaaggcgcgtaagttcgcattctggatggtagggccatcggccagcggatcggagaagggaacccccagttccagagcgtcggcgccagcgtcaatcagtgtgtcgataattttcagtgactgttcaatgccagggtcgcccagggtcacgaaggggacaaaagcgccttcccggcgatcgttgagctgtgcaaataaattttcgtagcgttccatcagatttcccctcgcgctttcaggatatcgtgtacggtaaagatgtctttatctccgcggccagagagattgaccaccagcagttgctctttttccggctgctcgcgcatcattttcagagcgtgcgccaacgcgtgggaggattccagcgccgggataattccctcatggcggcacaacgttttgaaggcttccagcgcctcatcatcggtaatggagacataatccgcgcgtccgatgctgttcaggtacgcatgttgcggcccaacggatgggaaatcgagcccggcggaaatggaataggactcttcaatttgcccgtccgctgtttgcatcatcggcgctttcatcccgaaatagatgccaacgcgaccatgtttaagcggcgcgccatgctcgccggtttcaataccgtgaccgccaggttcaacgcctattagcccgacgctggtatcattaataaaatccgcaaacatcccgatagcgtttgagccgccgccgacgcaagcgataacggcatctggcagacggccctctttgtcgaggatttgcgctttcgtctcttcgccaatcatgcgttggaactcgcgaacgatggtgggatagggatgcggtcctgccgccgtgccgagcatatagtgcgcggtttcgtaactaccggaccagtcgcgcagcgcctcgttacaggcatcttttagcgtagcggagccgctatgaaccgggataacctcagcgcccatcagacgcatacggaagacgttcggcgactggcgctcaacgtctttggcacccatatagatacggcatttcagacccagcagggcgctggcgagcgcagaggcgacgccgtgctgaccggcgccggtttcagcgataatctcgcttttacccatccgtttggccagcagcgcctgacccagtacctgattggttttgtgtgcgccgccgtgcagtaaatcttcgcgctttaaatacaacgtggtacgcgtaccggcggtaatgttctggcatttcgtcagcgcggtggggcgtcccgcgtagttttttagcagatcggcgaattgcgcctgaaattcaggatctttttgcgcgctgacgaaggcctcttcaagctggttcagcgcaggcatcaggatctgcggcacatacatgccgccgaattcaccaaagtaggggttgagaagtgttgtcatgttttttccttaatatgcgcgcagtgtctgaaaaaccgaggccagaagacgagcatctttgatgcccggctgtgactccacacctgaattaaaatcgagaccggcacagccgacttgcgccgcctggacgcagttatcggccgccagcccgcccgccagtaacacatcatccagcggttgcccctgtagcagtgaccagtcgaagcgctgcccgctgccgccttgcccattgtcgaaaatgtatttatcgacatggtgataatcgcgtgcgggaagggcattgctaacgctcagcgccttccagatttgcacattgcgcggcaacgcctcgcgcagcgcgttgacatacgcctggtcttcgctgccatgtagctgtacggcagaaagcgacaggacggcggctttctggcaaacatcggcgatatcagcgttctggaaaacgccgacatactgcaatggcgcgccgcttatcacttctcgcgcctgctcaacgctcaccgcgcgtggagatgagggcacaaaaatcaacccgccatatattgcgccagcgtcacaggccgctttagcgtcctgggcgcgggtcaggccgcagactttattttcgccaagcagcacgcgacggacggcggcgttaagatcgtcatgcgccattaacgccgagccaattaaaaaaccgttggcgaagtggctcagttcgcgtacctgaccataggtgttaatcccggactcgctgatgacagtcacgccgtggcccagttttggcgccagctggcgggtgcgattcaaatcaatcgacagatcgcgcagatcgcgattgttgatacctaccacttttgcgcctaacgctatcgcgcgctcccgttcttcgtcattactgacttccgtgagcacgcccattttcagactgtgcgcgacggcggagagttggcgatactgttcgtcatccagaaccgagagcatcagtaaacaggcatcggcctgatagtaacgggcaaggtagatctgatagggatcgataataaaatccttacacagaatcggctgcggtgcgctttggctaacgaccggcagaaaatcgaagctaccctgaaaatatttttcgtcggtgagcaccgagattgccgaggcgtaatgttgataaatattggcaatacgcgccggatcgaaatcatcgcgaatcacgccttttgatggcgatgctttcttacactccagaataaaggcggtacgcgcgccctggagcgcatcataaaaatggcgtgtacttggctggatctcattttgaaagctggccagcggctgttgctgtttgcgggcttctacccaaatcgccttgtctgcgacgattttcgctaaaacggtttgcattatttaccctcttgccgccagtgcggtgactctgtcatatgcggtgccgttgcgcagaacatcaagcacggtttgcgcgttggctttgagatcttcctgaccatgcagacgcatcagcatcgccacgttggcggcgacggcggcctcatgcgcggcatcgcctttaccttgtaataaccgcgtcagaatgtcacggttttcttccggcgtgccgccagccaactgatcctgatggtaaggcgtcaggccaaaatcctccgccgtaagttgatagcttttaatttcgccgtcatgcagctccgcgacaatcgtcggcgcatggagcgaaacctcatccatgccgccgctatgtaccaccgccgcgcgctgatagcccagtacccgtaaggtttccgcaatcggcagcaccagttccgggctatagacgccaatcaatgccagcggcggatgcgccgggttgatcagcgggccgagtacgttgaacagggttcgcgtttttaactgttggcgaaccggcatcgcgtgacggaatccggcgtgatatttcggcgcgaacaggaaacagacgcccagttcatctaacgcctgacgtgatttatcggcgttcatatccagattaataccgaacgccgccagcagatcggatgaccccgatttgctggacacgctacggttgccgtgtttcgccactttcagtccacaggccgctgcgacaaaggcgctggcggtagagatattgatactgttactgccatcgccgccggtaccaacgatatccgcaaacaggtagtccgggcgcgggaacggggcggcattttccagcaacgcagtggcggcgccggcaatttcattgggatgctcgccgcgaattttcatgctcaccagcgcggcggcgagctgttcaggtttaagttcgccgcggacgaccgccgaaaacaactgatggctctcttgttgcgtcagagtttgcgcctgatagagtttctccagaattggctgtagggtgttggtcggttccagcttttgctgcgcccaggctaatgtttgctccagtagacgcgcaccctgtgtcgtcaggatggactcaggatgaaattgaaaaccgcaaacgcgatccgcatcatgacgtaccgccatcaccatgccgttgaaatgggcgttaatggttagcccggcaggaacattactgccgaccagcgaatgataacgcgcgaccggtagcggattcgccagcccggcgaacatcgcctgaccgtcatgctcaatgctggaggctttgccatgcaggatttctcccgcctgaccgacataaccgccgtaagcttcgacaatcgcctgatgccccagacaaatgccgatgatcggtaacttgccgcgtagtcgggtcagcagctccggcatacagcctgcctcgctgggaacgcccggaccgggggagagcattagcaccggatttttcattgttgccaggcgatcgataagcgtctgcgccggaatatggttacggtaaatcaccacgttatgaccgttggtccgtagctgatctgccaggttccaggtaaacgagtcgatgttatcgagcagcagaatatcagccatcagaaggtctcctgtgcatgatgcgcggtggcgatagcacgcaatacggcgcgcgctttattacgggtttcatcggcttcagactgcggaacagagtccagcacgattccggcgcccgcctgtacggtggcgataccgttctccaccagcgcggagcggataacaatacaggtgtccagatcgccgtgggcggtgaagtaaccgaccgcgccgccatagctgccgcggcgctgtccttccgcatcggcaatcaactgcatggcgcgtactttcggcgcgccgctcagggtgcccatgttcatgcaggcgcgataggcgtgcagcgcgtcgagatcgtgacgcagttcgcccactacccgggaaaccagatgcatcacgtacgaatagcggtcaactttggtcagatcggcaacgtagcgactgcccggcgtacagatgcgcgccaggtcattgcgcgccagatcgaccagcatcagatgttcggaaagctctttatggtcggtacgcatgtccagctcaatacggctgtcgagatctctgtccagcgtaccatcggcgcggcgaccgcgtggacgggtacccgcgatggggtaaatctcaatctgacgactggcggcgtcatatttcagcgagctttccggcgacgcgccgaaaagcgtgaaatcattatcctgcataaagaacatatacgggctggggttgctctttttcagcacgtagtaggcagccaacggcgacgggcagggcagtgaaaagcggcgcgacggcaccacctgaaatatctcccccgcgcggatggctttttgcaactggcgtaccaccgcgccgaacgcgtcatcgctctgattgcattcgcagcgcatgtccggcaccggcgtgaccggcaacggcggcgcaggctgggttaactgttggctaaggtaagccaggcgggcgttcaggcgctgtttttcccggtcgcttgcggtgaacagactggcctgaatacgggtgctttttttctgatgatctatgaccatcagcgtttccgctaaataaaagcagtagtccgggcagttattgccagcctcaaggtgtggcagcgcttcaaagccagcgaccaggtcgtaggcaaacagaccgccgaaaaacatagcctcccgctcttgcgtcggtatgttcaccactccctgtaacagacggaacgcatcaaataccgacagagagcataaacgggcgtcttcatctaataatgggctgacgggcgggaagcgtagaacgcgaccggcaggcaggacttcgttctccacgccagcgggcagggcggtatccagtagcggcaataacgaggcgccattatcagataacgcctgaatggtgacagtgtcacctaaagcggtaatgcgcagcgcgctatctaccagcagcaggctttttaaatcatctttactgtcgatatccgcggattccagcagcagcgttgccgggcgatcgccgcagacctggtgaaaaagcgccgttgggttttcccgataggcggcatcgcaggtcaacagttcgagcgtgggttttggtgtttgcatggttattctcattattttgttcaaaaaaaagcccgcttaacaggcgggccgggtatcgtttggctgattacagctgttcatacaccgcccgctatcaggaagtgcgccaccaaccgtgtaatgcaaatgtcgctgccattttagataccctcttcatgtgaactttcgtactagttaactagttcgatggaataatgtcaacacctatttcagtatatttgccggaaccgttatgatgtacatgacataactttatctctatgggagccgccttgagcgacacgaattacgcagtgatttacgatctgcacagtcataccacggcgtccgatggactgttgacgccagaaacattagtacaccgtgcggtagagatgcgagtcggcacgctggcgattaccgatcatgacaccacagccgcgattcctgcggcaagagaagaaatttcacgttccgggctggccctgaatcttattcccggcgtggagatttcaacggtctgggagaatcatgagattcacattgtgggtctgaatattgatattgcgcatccggcaatgcgcgattttctggcgcagcagacacagcggcgtcaggcgcgtggtcggctcattgcggagcgtctggaaaaagcccatattcccggcgcgtgggaaggggcattgagactggccaatggcggcgcggtgacgcgcggccacttcgcccgctttctggtggagtgcggcaaagccgcgaccatggcggatgtttttaaaaaatatctcgcgcgtgggaaaaccggttacgttccgccgcagtggtgtacaatagaacaagctattgatgtcattcatcattctggcggtaaggcggtgttggcccacccgggacgctacgaccttagcgctaagtggctgaaaagattagtggcgcattttgccgaccatcacggcgacgcgatggaagtggcgcagtgccaacaatcacccaatgaacgcacccaactggcgacgcttgcgtgtcagcatcatttatgggcatcgcttggatctgatttccatcagccctgcccgtggattgagttggggcgtaaactctggctgcccgctggcgttgaaggcgtatggcaggcatgggaacagccgcaaatatcacagtgagggaagtatgagccagtttttttatatccatccggataacccacagcaacggctgattaatcaggccgtcgacattgtgcgtaaaggcggtgttattgtttatccaaccgattccggctatgcccttggttgtaaaattgaagacaaaggcgcaatggagcgcatttgccgcatccgtcatctgccggacggccacaacttcacgctgatgtgccgcgatttgtccgagttgtcgacctactcctacgtcgacaacgtggcatttcgtctgatgaaaaacaatacgccgggtaattacacctttatcctgaaggggacaaaagaggtgccgcgccgtctgttgcaggaaaagcgtaaaactatcggcctgcgcgtaccgtcaaacccgattgcgctggcgttattggatacgctgggcgaaccgatgctctcgacgtcgttgatgctgcctggcagcgattttaccgagtcggacccggaggagattaaagatcggctggagaagcaggtggatctgatcatccacggtggttacctcggtcaacagcctaccacggtaatcgatttgaccaatgactccccggtggtgctgcgcgaaggcgtcggcgacgttacacctttcttataagggcgtaagcctgtatactacgcggccttaaaatggcgcggcaacgcgccgttcattctcctgttcgacgcctgtgaaggcgacacctgaaggaagctctatgagcgaaaagttacaaaaagtgctggcgcgcgctggccacggctctcgccgtgaaatcgaatccattattgaagcgggacgtgtcagcgttgacggtaaaatcgccacgcttggcgatcgtgttgaagtcactcccggtttgaaaatccgtatcgacggtcacctgatttcggtgaaagagtcggcggaacaaatttgccgcgttctggcctattacaaaccagaaggtgaactgtgtacccgcaatgaccctgaagggcggccaaccgtttttgatcgcttaccgaaattgcgcggcgcgcggtggattgcggtaggacgtctggatgtcaacacctgcgggctattgttgtttaccaccgacggtgaactggcgaaccgcctgatgcaccctagtcgtgaagttgaacgtgaatatgccgtgcgcgtgttcggtcaggtggatgaatcgaaactgcgtgatttaagccgtggcgtacagttggaagatggtccggcggcatttaagaccattaaattcagcggcggcgaaggcattaaccagtggtacaacgtgacgctgacggaagggcgcaaccgcgaagttcgccgactgtgggaagcggtaggcgttcaggtcagccgtctgatccgcgttcgttacggcgatatcccgctgccgaaaggcctgccgcgcggcggctggactgagctcgacctcgcgcaaacgaactatctgcgtggtctggtagagctcccgccggaaacctcgtcgaaggttgccgtcgaaaaagaccgccgtcgtatgaaagcgaaccagatccgtcgggcggtaaaacgccacagccagatcgctggcggacgccgctccggtgggcgtaataacaacgggtaatctctaccgcggtctataggccgagaatcatcagacaagagggtttgtgccggatggcggcgcaaacgccttaatccggcctacggttaataatcaattcccatctgggcttttacgcccgcgtcaaaagcatgtttaaccggacgcagttcgctgacggtatccgcaagatcaagaatatcccggtgacagccgcgacctgtaataatcaccgtctggtgaccagggcgcgcgtttagcgcgcttatgacctcttccagcggcaaatagtcatacgccaccatataggtcagctcatccaggaccaccatatcaagcagcggatcggccagcatccgtttcccatgctgccaaacggccatacatgctgcggtgtctgcctcgcgattttgcgtctcccaggtaaatcccgttgccatcacctgaaattcgacgccatgcggttccagcagattacgctcgccgttgggccaggtgcctttaataaattgcaccacgcctacgtttttaccgtgtcctacggcgcgggcggcagttccgaaagccgccgtggttttgcccttaccattgccagtaaacacgataataataccgcgctcttcctgtgcctgggcgacacgggcgtcaacccgatcttttaccttctgctggcgctgctgataacgttcatcactcattgggcgattcctggtttacggcccggttgggcgtcaaaggtcataccggttttacggcgactgtcgtcgcccataagccacaggtaaagcggcataatatcggcaggcgtttttaatttctgtggatcttccgtcggaaaggcgctggcgcgcatactggtgcgcgtgccgcccgggttaatgcagttaacacgcagagaacgattctggtattcgtccgccagcacctgcatcattccttcagtagcaaacttcgaggtggcataggcgccccagttggcgcgtccctgacggccaacgcttgatgacgtaaagaccagcgagccggcatcggacttcagcaataacggtaacagcgcctgggtgagcataaaggtggcgttaacgtttacctgcatgacatcctgccagatctgcggatcttgttcgctcattggaccgatttcccccagtaacccggcattgtgcaggacgccatccaggcggggatagtgcgcggcgatgcggtcggccacttgccggcactcttcagcggtgcaggtcagcagatcgagcgtaaaccactgtggttgaacatgttgctcgtcagcaatgtgctgcgcgacccgacgcagtttctcttcgttgcgtcccagcagaatcaccgttgcgccgtaacgcgcatacgtaagcgcggcttcccgcccaatgccatcgctggcgccagtgaccagaataatgcggttttgcaatagatcttgtttcggttggtaatgcatggctactcctcaacggtgtggtgcaccgtcctgccaggttgtcttatcttcgcgttaacttttcgggtttatgcctgaaagcgccttttttttcaatcagacaggggcgataacgccgtaaaatgaacgtcttgtcatactttttcttcctcaacaggcatacggatgaagagagactgacttcgatgcctgttgtacactgagcgcaagtcgcgttatttaatcaaggtgggagtcgtggaattgttgtctgaatatggcttatttttggcaaaaatcctcaccgttgtggtggccattgccgtcattgtgctgctgatcgtgaatgctacgcaacgcaaacgtcagcgcggcgagctgcgcgtgaccaatttgagcgagcagtatcaggagatgaaggatgaccttgctgcggcgttgatggatggccatcagcaaaaactgtggcataaagcgcagaaaaaaaagcataagcaggaggcgaaagccgccaaagcgaaagcgaagctgggggacattgcgacatcggacaaaccgcgcgtatgggtgatagatttcaaaggcagtatggacgctcacgaagttaatgcgttacgcgaagaggtcacggcggtgctggcagtggcgaaacccggcgatcgggcggttgtgcgtctggaaagccccggtggcgttgtgcacggctatggcctggcggcatcgcaattgcagcgcctgcgcgataaaaatattccgctgaccgtgacggtggataaagtcgcggcaagcggaggctacatgatggcctgcgtggcggaaaaaattatcgcggcgccgttcgctattgtggggtcaattggtgttgtcgcgcaaatcccgaactttaaccgctttctcaaaagtaaagacattgatattgaactgcataccgcagggcagtacaaacgtaccctgactttgttaggcgagaatacggaagaagggcggcagaagtttcgtgaagatctcaacgaaacgcaccatctgttcaaagagtttgtgcagcggatgcgtccggctctggacattgaacaggtcgccacgggcgaacactggtacggtcagcaggcgctggagaagggactggttgatgagattaacaccagcgatgaggttatcctcggcctgatggaagggcgcgaggtgctgaatgtgcgctatatgcagcgtaaaaaactgatcgatcgtgttaccggcagcgcggcggaaagcgcggatcggctgctgctgcgctggtggcagcgtggacaaaagccgttgatgtaaaccgctattgccggatggcattcagcgccatccggcatggattaatcaaccaggtgatacttctcagacagcacatgcgccaggtgtttaaacatgttaaacaccgcggtgcttttaggggtcggtaacccttgctcgtctaaaaagtaatcgccgctgaaaaccagcacgccatttctctgcgttacgccggtggcgacaatacctgccatcgtgtcttcatgttcccgaataattttgttggcttcaagcaacagtgtttcgcgatcgataggttgcgtctctttatgcattttttactccttaaacaaggagattagtctacgctgagcacttctgatgggcaaatattctcacaggaaattgatggatttgtcatgttgcgttcactggcaagatttgtttttgcatgctaataaagttgcgtatcgaattttatcaggtacagtgtgacgctttcgtcaatctggcaacagaattgcttgacattcgaccaaaattccgtcgtgctatagcgcgtgtgtgcaaaaaagcctgttaactcagtcacctgagggttacatttcgtacacaaagccagtacaaggggttgatatccgcagacgcagagaccatatatcgttgtctcgtcgccagtggaaggtgaatcaacgtgcgacgcattcctggaagaatcaacttaggtaaaggtgaatatgggtaaagctcttgtcatcgttgagtccccggcaaaagccaaaacgatcaacaagtatctgggtaatgactacgtggtgaaatccagcgtgggtcatatccgtgatttgccgaccagtggctcagcagctaaaaagagcgccgactctacctccaccaaaacggctaaaaagcccaaaaaggatgaacgtggcgctctcgtcaaccgtatgggggttgacccgtggcacaactgggatgcgcactatgaagtgctgcccggtaaagagaaggtcgtctctgaactgaaacagttggcggaaaaagccgaccacatctatctcgcaaccgaccttgaccgcgaaggggaagccattgcatggcacctgcgggaagtgatcggcggcgatgacgcgcgctacagtcgcgtagtctttaacgaaataaccaaaaatgccattcgccaggcgtttgaacagccgggcgagctgaacattaacagggtcaacgcccagcaagcgcgccgctttatggatcgcgtggtaggctatatggtctcgccgctgctgtggaaaaagatcgcccgtggtttgtcggcaggtcgcgttcagtctgtcgcggtccgtctggtcgttgaacgcgagcgcgagattaaagcgtttgttccggaagagttctgggaaattgacgctaatacgacgacgccgtctggcgaggcgctaccgctacaggtcacgcatcagaacgacaagccattccggccggtaaatcgcgagcagacgcttgctgcggtgagcctgctggaaaaagccagctatagcgtgctggagcgagaagacaagccgaccagcagcaagccaggcgcgccgtttatcacctccacgctacaacaggcggccagcacccggctgggctttggcgtgaagaaaaccatgatgatggcgcagcgtctgtatgaggcgggctacatcacctatatgcgtacagactccaccaacctgagtcaggatgcggtcaacatggtgcgcggctatattggcgataatttcggcaagaaatacctgccggataacccgaaccagtacgccagcaaagaaaactctcaggaagcgcacgaagcgatccgtccttccgacgttgcggtcatggcggagtcgctgaaagacatggaggctgacgcgcagaagttgtatcagctaatttggcgtcagtttgtcgcctgtcagatgacgccagcacaatatgactccactacgcttaccgttggtgcaggcgagttccgtctgaaagcgcgtgggcgtattttgcgctttgacggctggacaaaagtgatgccggcgctgcgtaaaggcgatgaagatcgcacattgcctgccgtgaataagggcgatgcgctgacgctacttgaattgacgcctgctcagcactttactaaaccgccagcccgtttcagcgaggcttctctggttaaagagcttgagaagcgcggtattggtcgtccgtctacctatgcgtcgattatctcgaccattcaggatcgcggctatgttcgcgttgaaaaccgtcgcttctatgcggaaaaaatgggtgaaatcgtcaccgatcggctggaagaaaacttccgcgaattgatgaactacgattttactgcgcagatggaagatagtctggatcaggttgcgaatcaccaggccgagtggaaagcggtactggataacttcttcagcgattttactcagcagctcgataaagccgagaaagatccggaagaaggggggatgcgtcctaaccagatggtgctgaccagcatcgactgtccaacctgtggccgtaaaatgggaattcgtactgccagtacgggcgttttccttggatgttcaggttatgcgctttcgccgaaagagcgttgtaaaacgaccattaacctggtgccggaaaatgaagttctgaacgtgctggaaggcgacgacgccgaaaccaacgccctgcgcgccaagcgtcgctgccagaagtgcggtacggcgatggacagctatctgatcgatccgaagcgtaaattgcatgtgtgtggtaataacccgacctgtgacggctacgagattgaagaaggcgagttccgcatcaaagggtatgacggcccgatcgttgagtgtgagaaatgtggttccgaaatgcaccttaaaatggggcgttttggtaagtacatggcctgtactaacgacgaatgtaaaaatacccgtaagatcttgcgtaacggcgaagttgcgccgccgaaggaagatcctgttccattaccggaactgccgtgtgaaaaatcggacgcgtactttgtgctgcgcgatggcgccgcagggatattcctggcggccaatacgttcccgaaatcacgcgaaacgcgcgcgccattagtcgaggagctttaccggttccgcgatcgcctgccggaaaaactgcggtatctggcggatgcgccgcagcaggatccggaaggtaataaaaccgttgttcgctttagccgcaaaacaaaacagcagtacgttgcggcggaaaaagacgggaaggcgacgggatggtcagcgttcttcgtcgacggcaagtgggttgaaggtaagaaataaccccggcctgtcgccactgtagtcaagcgggccgcgtaagcggcccttttttatatccccttcatacttcaagtggcttatgtgttggctacggattactcggcccatctatggcctcgccctgacgggccgtcgcacgcgacgttcaaatctgctcccggcagatttgtcgctcaccccagtcatatagttatctatgctcctgggaactcactcccttgccgcctttaagcaactcgaattattttaggtatagcggtcttattattttatcgcgctggctatacagttcagatataaatgatatagtggttatagttaacaccttttttattattaaatcgtattagcagcccgattaagtctgcagataaacgatggcctgatggcgctaatctggatgatgtattatgaaattgcagcagcttcgttacattgttgaagtggttaatcataaccttaacgtctcctctaccgctgaggggttgtatacttcccagccggggatcagcaagcaggttaggatgctggaagatgagcttggcatccagattttcgcccgcagtggtaagcatctgactcaggtgacgcccgcaggtcaggagattattcgtattgcgcgtgaggtgctttccaaagtcgatgccattaagtcggtcgccggcgagcacacctggccggataaaggctcgctctatattgccactacccatactcaggcgcgttacgcattgccaggcgtgattaaaggcttcatcgagcgttacccgcgcgtttcgctgcatatgcaccaggggtcgccaacgcagattgcggaagcggtatcgaaagggaacgccgatttcgcgattgccacggaagcgctgcatttatatgacgatctggtgatgttgccatgctatcactggaaccgttcgatagtggtgacgccggatcatccattggcggcaacgtcttccgtaacgatcgaagcgctggcgcagtatccgctggtgacgtataccttcggctttaccgggcgttccgaactggataccgcttttaatcgcgcaggattaacgccgcggatcgtctttactgcaaccgatgcggatgtgattaaaacgtatgtcaggttgggactgggcgttggcgtcattgccagcatggcggtcgatccgcttgccgatcctgatttagtgcggattgacgcgcacgatatttttagccacagcaccacaaaaattggttttcgccgtagtacttttttacgcagctatatgtatgattttatccagcgttttgcgccacatctgacgcgtgatgtggtggatacggcggtggcgttgcgttctaatgaagaaattgaagcgatgtttcaggatataaagctgcctgaaaagtaatatcaccgtcggtttgtgtcgtagtggcatggcagacaaagccgccttttgcaatatccctcgaagtattacgggtaatgatcagcaaaatagtgttgaattacccgtcccgccagtttctttttccaaatagttatcttgagtcaaaagattgatttattcactggcaacgattcgtaaattgactggatttttgactaaagtttatttaggatttgtctcatctgatgattaattgtaccgattgtttggtgctgaaatgataagtgataccgatagcatgaggttagtaatgccttctgaaaaccaggaaccgcgccgcgaccctgagctcaaacgtaaagcatggctggcggtttttgtgagttctgcgttgttctgggtagtggtagcgcttgttatctggcattggtggggctaagtgagcattacgtcggaacgcgagcgcgtggtcgcgcccccgattcaatctggtgacgatgataacaccccggatacgaccgtttttcggtctgttccgcaacactggacgctcacaccgcagcagcgggcatttattgatgcttttgctgacgaggtgtcacaaaaataatattcgtctttttattggcgttactgttttattaacgctgtcttattacaccgcagcaaccgtgtgctgagcgcttctcagtattgattaaacacagttggtgtcgcctatgttaacgtcaaatataaagtattggtcatggactggcgcgtttatattatcgctactgttctgggccgagttaatctggattgccgtctaatctcgtcaaagcccgataatgcgttatttatcgggctttttcatcttcgttcctcgcctgttaggtttctcctcttttagcaatttgggttgttatcaaaacgttacattttgtttgtgttatctttaatacaaccctgtggagaatcagggtaacgcaaccctgtcatttaaggaggagctatgtcgtcaaccctacgagaagccagtaaggatacattgcaggccaaagataaaacgtatcattactacagtctgccgctggctgccaaatccctgggcgatatcgcccgtttgcccaaatcacttaaagtgttactggaaaacctgttgcgctggcaggacggcgaatctgtgactgatgaagatattcaggcgctggccggttggcttaaaaatgcccatgccgatcgtgaaattgcctggcggcccgcccgtgtcctgatgcaggactttaccggcgtgcctgccgttgtcgacctggcggcgatgcgtgaagccgttaaacgcctcggcggcgatacgtcgaaagtgaacccgttatcgccggttgatctggttattgaccactctgtgacggtcgatcatttcggcgatgacgatgcgtttgaagaaaacgtgcggctggaaatggaacgtaaccatgagcgttatatgttcctgaaatggggaaagcaggcattcagccgtttcagcgtggtgccgcccggcaccggcatttgccatcaggttaacctggaatacctgggtaaagccgtctggagcgaattacaggacggggagtggattgcttacccggactcgctggtggggactgactcccatacgaccatgattaatggtctgggcgtattggggtggggcgtgggcggtatcgaagcggaagcggcgatgcttggtcagcccgtgtcgatgcttatcccggatgttgtcggctttaagttaaccggtaagcttcgggaggggatcaccgctactgacctggtgctaaccgtcacgcaaatgctgcgtaagcatggcgtcgtgggtaaatttgttgaattttatggtgatggtctggattcgctgccgttggcggatcgcgcgaccatcgctaatatgtcgccggaatatggcgccacctgtggtttcttccctattgacgccatcaccctggaatatatgcgattaagcggacgtagcgacgatctggtcgagctggttgaagcctacgcgaaggcgcagggaatgtggcgtaatcccggagacgaaccggtatttaccagtacgctggaactggatatgggcgatgtcgaggccagcctggccgggccgaaacgcccgcaggatcgcgtggcgttaggcgatgtgccgaaagcctttgccgccagcgccgagctggagctgaataccgcgcaaagagatcgccagccggttgactatacgatgaacggacagccatatcagcttccggatggcgctgtcgtcattgccgccatcacctcctgcacgaatacctcgaatcccagcgtgctgatggcggcgggattactggcgaaaaaagcagtaacgctggggttgaagcgtcaaccgtgggtcaaggcttctctggcgccggggtcaaaagtggtatctgactatctggcgcaggccaaacttacgccttatctggatgagctcggttttaacctggtcggttatggctgtacgacctgtatcgggaactctggtccgttgccggagcctattgagaccgcgattaaaaaaggcgatctgacggtaggggccgtgctttccggtaaccgaaattttgaagggcgtatccatccgctggtgaaaacgaactggctggcgtcgccgccgctggtggtcgcgtatgcgttggccggaaacatgaatattaacctcgcgacagacccgctggggtacgatcgtaaaggcgatccggtatacctgaaggatatctggccttcggcgcaggaaattgcccgcgccgttgaactggtatcatcagatatgttccgtaaagagtatgcggaagtgtttgagggcacggaagaatggaaatcgattcaggttgaatcgtccgatacctacggctggcagtcggattcaacctatattcgcctgtcgcctttctttgatgaaatgcaggcccagcctgcgccagtcaaagatatccacggcgcgcgtatcctggcgatgctgggggattcggtaacgaccgaccatatttctccggccggcagtatcaagccggacagtcccgccggacgctatctgcaaaaccacggcgttgagcggaaggattttaactcctatggatcacggcgcggcaaccatgaagtgatgatgcgcggtacgttcgccaatattcgtattcgcaacgaaatgctgcccggcgtcgaaggtgggatgacgcggcatttgccgggtacggaagcgatgtcgatttatgatgctgcgatgctctaccagcaggaaaaaacgccgctggcggtaattgccgggaaagagtatgggtcgggatcgagccgtgactgggcggcaaaaggtccgcggctgttaggtatccgcgtggtgatcgccgagtcgttcgaacgtatccaccgctcaaacctgattgggatggggatcctgccgctggagtttccacagggcgtaacgcgtaaaacgctgggactgaccggggaagaggtgattgatatcgcggatctgcaaaacctgcgccctggcgcgaccattccggtgacgttaacgagatcggacggcagcaaagaaacggtgccttgccgctgtcgcattgataccgccaccgagctgacttactaccagaatgacggcatattgcactatgtcattagaaatatgctgaactaaagccgtttatcgggcctgccgtaaacaggcaggcccgcgctttaataccggtggcttacttgcttagtaggtggcccattttggccgctttagtatcgagataatgctcattatttggattacgacccacaatgagcggaacgcgttcgacgatattaattcccgcctcggtcagtatttcgactttcttcggattattggtcagcaggcgaacttcatctacgcccagtaatttgaacatatccgcgcacagggtgaaatcacgctcatcggcggcaaagccgagctgatgattggcctccaccgtgtcatagccttgatcctgtaacgcataagcgcgaattttattaagcaggccgatattgcggccttcctgacggtggtaaatcagaataccgcgtccttcttccgcaatatgcgtcagcgcggcttccagttgaaaaccacaatcacagcgcagactaaaaagcgcgtccccggtaagacattcggaatgaacgcgagccaagaccggcgttttacctgaaatatcgccaaaaaccagcgcggcatggtcgtgtccggttgccagttcttcaaatcccaccatcagaaagtcacccaatggggttggcagtttggcttctgccacacgtttaagctgcatgtatttctccagattatgctgacgcctgcggtgtcgtcgcctgttggattgtatcccgctattttgccataaggcggcggtcatcacctaatcactaccacgtaattgctcaggaatggcacaaatttgtcaattttccagtccggcgagaattttcagttatgattgtgatacttacttataaaaggagcatccatgctttcaattgcgaggcgcaccgcggcaggcgccgccctgttgcttatcatgccgcttgccgtatgggtatcaggctggcagtggcagccaggacatcaggtctggtggctaaaaacgctattctggataacggaaaccgtgaccaaaccctggggcgttatcacgcatgtgattctttgtggatggttcttatggtgcctgcgatttcgcctgcgcgccgccattatgctgtttgcgatcctcggcggggcgattatcgtcgggcagggtgtgaagtcatgggtaaaggagcgcgtacaggagccgcggccatttgtggtctggcttgaaaaaacgcaccatattcccgtcgatgagttctacactttaaagcgtacagaacgcggacatttagtgaaagagcagttggccgggcaacagaacatccccgttttcctgcgtcagcactggcaaaaagagacgggctttgcgtttccctccggacacaccatgtttgcagcgagctgggcgcttttggccgtgggtctgttatggccgcgcagacggactttcaccatcgcgtttttgttagtctgggcgaccggcgtaatgggcagccgtttgcttctgggaatgcactggccgcgagatttagtggtcgccacgctcatctcctggctattagttaccctggcgacctggctggcgcagcgaatttgcgggccgcttatgccgcctcgcgaagaagcgcaagaaattgctgaacgcgagcaggaaagctgacaacggttgattttctgactattgcccttaaatcatctgatggtgggcgcatttccatttcgcgcgaggcgggaaaatggtaatttagaaggctggatgcggtaagttggacacgatttattcgcgcaaaccacataacgggaagtaatgtgaaatatttactcattttcttactggtattggcgatttttgttatttcggtgacgctgggcgcgcagaatgatcaacaggtgacgtttaactacctgctggcgcaaggggagtatcgtatctccacgttgcttgctgtgttgttcgccgtcggttttgcgattggctggctgatttgcggcctgttctggctgcgggtccgcgtttcccttgcccgtgctgaacgtaaaattaaacgactggaaaacaagctctcgccagcaaccgacgttgcggtccctgccgactcgtcggttgtaaaggaataatcatttatgttggagttgttatttctgctgttgcctgtagccgctgcctatgggtggtatatgggtcgcagaagtgcgcaacaaacaaaacaggatgaagctaaccgcctgtcgcgcgattatgtcgcaggggttaacttcctgctgagtaaccaacaagataaagcggtggatctgttcctcgatatgcttaaagaggatacgggcaccgttgaggctcatctcactctcggtaatctgtttcgctctcgcggcgaagtcgatcgcgccattcgtattcatcaaacgctcatggaaagcgcttcattgacctatgaacagcgtttactggctgttcagcaactggggcgcgactatatggccgccggtttatatgaccgcgcggaagatatgtttaaccaacttaccgacgaaacggaatttcgcgtaggcgcgttacagcagctcttgcaaatctatcagctaaccagcgactggcaaaaggcgatcgaagtagcagaacggctggtgaagctgggcaaagataaacaacgtatcgaaatcgcccatttttactgtgagttagcgttacagcagatgggcaacgacgacatggatcgcgcgatggcgttgctgaaaaaaggtgccgccgcagataaaaatagcgcccgggtgtctatcatgatggggcgcgtttatatggcgagaggggattacgccaaagcggtcgaaagcctgcaacgtgtgatcgttcaggataaagagctggtcagcgaaacgctggagatgctgcaaacctgttatcaacagctcggtaaaaatgccgagtgggcggagtttttacgtcgcgccgttgaggagaataccggtgctggcgctgagttaatgcttgccgatattctggaagcgcgtgaaggtagtgacgcagctcaagtctatatcacgcgtcagctacagcgacatcctaccatgcgggtgttccataagctgatggattaccatctcaacgaggcggaagaagggcgagcgaaagaaagcctgatggtactgcgtgatatggttggcgagcaggtgcgcagtaaaccgcggtatcgttgtcagaaatgcggttttaccgcctataccttgtactggcactgtccgtcctgccgggcatggtcgaccattaaacctattcgcggacttgatgggcagtagtatataaaaaaagcttcaatttagttacaacatacttgatgacgtaaagctagaaacgacgctggcatcggcggccagggcttatcaggttgtcaatcgaacctgttaatttccctgcgccgcaggtagaatgcacgccgtttatccaatttgcgccacttccggtgcccatcatcaagaaggtctggtcatgacgtttactgcttcatcttcttcctgcgctattactgaatcgcctgtcgttgtggcgttggattaccatgaacgcgataaagccctggcgtttgtcgacaaaatcgatcctcgcgattgtcgcttaaaagtgggcaaagagatgttcacgctgtttggtccacaactcgttcgggatctccagcaacgtgggtttgatgtctttcttgatctaaaatttcatgatattcccaacaccacggcccgggcagtcgccgcagcggcagacctgggcgtctggatggtaaacgttcacgcgtctggtggggcgagaatgatggccgcagcgcgcgacgcgctggcgccattcggtaaagatgcgccgttgctcattgccgtgaccgtgttgaccagtatggaaaccagcgatctacacgatctgggcgtgacgttgtcaccggcggaacatgcggagcggctggcgcgcctgacgcagcaatgcgggctggatggcgtggtctgttccgctcaggaagctgtcagatttaaacaggcctttggcgctgcatttaagctggtgacgccgggcattcggcccgcaggcagcgaggcaggcgaccagcgacgcattatgacgcccgaacaggcattatccgctggcgtcgactatatggtgattggccgcccggttacgcaatcggtagatccggcgcaaacgctgaaggatattaacgcgtcactgaaacgggaggcataatgagcgattccaatagtcgtctggtttattcaacacagacggggcgcattgaagaacctaaaacggcgccggttcgtcccaaaggggatggtatcgttcgcattcagcgtcaaaccagtggccgtaagggtaaaggcgtatgtttgattaccggtatcgagatgaatgatgcggaattaaccaaactggcggctgaactgaagaaaaaatgcggctgtggcggggcagtaaaagaagggattattgaaattcagggtgataaacgcgacttgataaaatcattgctggaagctaaaggaatgaaagtaaaattagctggcggctaatgaaaacgccacggttgtaaattaccgtggcgtaaaagtcaactttgtctatttttgtaatccagacctgaaaagaataaacgtattattttgagccgttcaatatttaaacgtctggattattttccaacctggtgaccaatcacgccgccgaccgccgcgccgcccagggtgcctaatgtactgccgtccgttaacactgcgccgcctaacgcccccgcacctgcgccaatagccgtgttgcgatcgcgcttggaccagtttgagcaggcgctcagagacattgctacggtgattgccagcacagcagcggccatttttttgctcgtcataaacataatactctctcctgaattaacgattcacggaattaagctcactataactatagttaaaataaaacctgttaagagattttccgtaaaacctgattgcgcaggggtatatcacgcaggtgatagtcacttcctgttatttcgctaatattaattttacgacgttacgctcgttacaacaggtaaatagtcttaattgggatgtcagaaaagtcttagagagaggatgatttgccatagggcaaaccatcgggaaatattttaaacggatgagccaataacattgactagcagccccgcatgttctaactgcatttgatcgctggcggaaattttggaatccgtaatgacacgatggaagcgagagagcgggcccaggggatagggatgcacacagccaaatttggagctgtcggtgaggacaatcgcttctgagcctttttccagaacagcgttaaccacatccgatcgcatcatgtcgcgtccggtaaaaccggtatcagcctgccagccatcaataccgataaatgctttgctgaaatgcacttgatggataaactgtcgcgtcaacggccctaccatgctttcactttttttctgatagattccaccgaggagaatgacttcgcaaggggtctctttgagcaggtgcgcgatataactgctcacggtgatgatcgtgacatctttttgttccgccagcgtccgggccaatagcgcattgctgctgccattttcaataaaaacggattcccctggactgaccagcgaggcggcgaactccgccagtcggcgttttagcgtgtagttcgtcatcatgcgagtctctacgtcatcgctctcaagcgaaacggcgaaaccgtgcgcacggcgtaaatagctctgcttttccagggtattcagatcctgacgaatcgtgacttcagatacgccggtaattttcgccagttcagcaacgctcatctggcctttatcaaccaccatttgcaaaattgattgttgtcgggagttcatagtattaattttattcgttaagaggagtcaacagacagtcagagagccgggaagggctaacggccatcccggacaaataatcgctatcagatttcccagggcgacccgggagcctgggatggcgagataccgtctttaacctgatctaacagctctgctctcaatatttcaaggttattgatggccgagtggtaatcgccagcaacaaggatatccagcacggtatcaatgcgtgcggcaattcgttgtgcttcgatatcagacatgtttgtcatccttaatgtcagaaaaggtttcaattcatgatgcagaaattaatctgaaaagagaagggaaaaatagggctatgcctgtctgcacaggctgttctccctattatcgccgccattaacgcatttttttcgtctgataacgtttgtaccagcgttcaaaagaaacggcgggcataggtttggcgaataaaaagccctgtcgttcattgacgccgttttttgtcaggaaggcatcttctttagcattttctacgccttcggcaatcacttgtaaatttagcgcctgagccaccgcgacaatcgcccgaaccagagattgcgacagcggttgcttatggatatctctgacgaaagcctgatccagtttaacggcatcaatagggaaccgggcgagttgagaaagcgaagaatacccggtgccaaaatcatccagatgaatctgggcgccgagctgactaaattgctggataaccgatagcgccagcgtgtcgttttcgatcaggcagctttccgttagctcgacatcgatcgggcaatactcaaaattcagatcgtacaaagcctgtttaagcgcagtaaaaagcgtctggtcggccagttgtcgcgccgaaaagttaacggctacgcgcaagttaatccccttatcgcgccatctcgcaatctggcgaaccacatccagaatcacccagcggcccagcgggacgatgagtcctgactcttcggcgtatgagatgaactccagcggcggaattaatccgcgttccggcgattgccagcgtaccagcgcttccaggctacgtacttcgccgcgccaggtaattttgggctgatagtgaataagtaactggtcgttttccagcgcttttcgcaggtttgtatccagccagtgatagtcaaatacgcgctgattcatttccggcgaaaaaacgcagaactgaccgcggccgccttctttggcgttatacattgcggtgtcggcagtgcgaatgagactgtcgctgtcctgtccgtgccggggggccaacgaaatgccaatggcgcatcccgtgtaaacttcaatgagtccaatacgaaacggttgccgcagacgggtaaggattcgtgaggctactgcttccagcgcggcctgagacgtatgggcagcgaggacaatgaattcatctccccccagtctggccagcaattgatcttcctccagacaactcaacagcgccagcgaaacggcctgtaagagctgatcgccaaacatatgcccataggcgtcattaattttcttgaagttatccagatcgagataaacgatacccacttgcgactcgccagccgaggcaatagcatgattaataaattcatggatcgcattgcgattgggcaggccggtgacggtgtctgtattcgccagtatgcgtaaacgctcctgagcccgcctttcttcggtgatatccgtgcctgcgcagatcaggaaaatttcgttttttccgctaccgttatggacaaatttattacgaaataagaacaggcgttggcctttacgggtctttatccagcgttcgatttcataggcattgccattgcgaaaaaaattctcaatgtagtgccgggaggcaaccgcctcccggcgactcataaataatttaaagacgctttgaccaattacatctcgctcttttaagcccgtgtactcttcgcataaccgattaaatcgacagatttttccccgactatccagtatcgcaatgactgagttggcttctgatacgatttgctcggcaaaagagagctcctgcgcctgcgttggcgcgacggcaggcgtatcaggccaggttgccaggctgccagcccattcacggttattaatcttacggcctaccaggtgcacagcggtaacctgtttttctatcaacaacgttatcagcagactggacgtaatcgccgttatttcccggatacgcccggcttgctccggcgatagctcgaccgttttttctgtatccgtttcacctgtcggggagagatacagcacgttgcggtcatcagccagacgccagtgagagtgaaggggatttagcgccgtttgttcctgaatctgtttcatcatgcgtaccatcccatttaagcgccaggtgcccgaaaagaaaggttagccatgttatacataagggtaattatggctgaacgtattgttttatctatgtattcatatgtaatccagattctggaaaaagcatagtcgccagctaaaaataacaagaaatggggcgcttgaataagattaaacttagagcatgacggaagggagaagaagaaaagaaacggcctttgccttctcagcaaaggccgttgagcgagctaagcgtggttacgctgccggtcgggcaataatgctgcgggtttccatgcgaacttccgcaatagtgacatcaatgacatccgtcactttataaaccgtctcacctttaatctgtaccgtaccgttttcctggctgcataccagttcatcgcgaacggcgtgcaggaacggggcagggataaaggcgatagcgccgttatcgaccagtcgcacacgcataccaccgcggctgacgtcaataatttctgccgcgaaacgggtatttgtccccgccttatcgttaaggaagcgtgcatataaccagtcgccgacatcgcgctccgccatgcggttcaggcgacggcgttccgccatttgctgggtgatatcttcctgcggacgcgcaatagcctcccccttgatgaccgctttcagcaggcgatggttaatcatatcgccatacttacggataggagaggtccaggtggcgtaagcctcaagaccaagaccgaaatgcggccccggctcggtgctgatttccgcaaaagactggaagcgacgaatgcggctgtcaaggaaaccggagggctgcgcatccagttcgcgacgcagtttacagaagccttccagcgtcagcacctcttcggcatcgacatgcagaccatgcgttttcagcagcgcggccagcgcgtcggcattcgcgggatcgaagcccgtatgtacgttgtaaataccgaaaccgagcttatcgcgcagtacgcgcgcggcgcaaaggttagcggcgatcatcgactcttctacgatacggttagcgatacggcgcggttccgccacaatatccagtacttcgcctttttcgccaagcacaaagcggtaatccgggcggtctttaaagactaacgcatgatgatgacgccactcactgcggcttaggcaaatacggtgcaacagacgaatctggtgggcaatgccttcgttatccggctgccaggtgccgttattttccagccagtcggagacattgtcgtacgccagcttggccttcgattcgatggtggccgcaaaaaaggcgatatcatcgtcaatggtgccgtccgcggagattatcatgcgacaggcgagcgccggacgcacttcgttggcgcgcagtgagcacagatcgtcagacagctcacgtggcagcataggaatattgaagcccggcaggtagttggtgaaggcgcgaattttcgcggcgttatccagcttactgccttcggcaatccaggcggtaggatcggcgatagccaccgtaagctggagtctgccgtccgctaattcctcagcatatagcgcgtcatccatatcttcagtgctggcgctatcgatagtgacgaaattcagcgcggtcagatcctgacgctccagcccttcgtccagcatctccgtcgctacgccgttcggcgcttctttttccaggttatggcgggcaagcgtaacccaccagggaacaaagtgatcgtcggcaaaggtgatgtactgcgttaaatcggcgtaaaacgaacggtcgcctttaagcggatggcggcgcatttcggcaaccgcccagtcaccttctttgaactcatgctgaacgccgcgcgcggcgcggcagggaatcgcgtctttcagcaacggatgatccggcacgatggacaggcggtcatttttaccctgaacttttcccacaaaacgcgtcaggaacggttcgatcagttcttccggctcggcagactcacgttctttttccgtgtggatgaccgcgacgatacgatcgccatgcatcacttttttcatctgcggcggaggaatgaaatagcttttttgcgcgtcaacctcaaggaagccaaagcctttttccgtggcttttacgaccccttcagcgcgcggcgtctgggaatgcagttgctgtttaagctgcgctagcagcgggttgtcctgaaacatattcgtctattttcgtagccaaaagagcggctgacagttttacgcgattctgcctggcgcagcaagcgctctttcagtaatggatgagttaataggtttcgcccaacgcgatttttaaacgatttaaccatccgcacacgccgcaccagcctaacatattaatggcctgctccgatgaaactcccctggtgagtagcgggaaaaaatgcgcggcgctaaagcgatcgggcgctctggtgagccattgtatcgcctgtgtcagcgcaggctcaagttcccaacgagcgatgtcgtcgtcttcctggcgtaacgtgatgacagcgcgacgccacgcgccaggttgggttgcctgttcgttaaagcaggcggcgctgccgttgatacgtgatgtgaggagcgtgataagtggaagtaaagaagggggcgatgcagtgtgtaatgtgctggtcagtatgcgttcgagtaacgcgaatgaagacggatcgcgcatgagtaccggcgccatcatttggcattgtgaagacgaatattgccgccgaactttggtatgggctggaggatattctaccagactggcggcgggccgccatatcgtctgggggttttgaaaccgcgcggccctggcaaagcgctgcatctcctggccgggcagttcgcgcacgggcagacggcaaaacgcctgaaatatcgccgctacccgcgcctgaaaaccgataaacccaatgatctgattgatgagtacggtatcccgggcggttaatcccacctctgcaagctgttcgcgggctcgcgtattgataacggagggggagccggcaagctgacgagcgtattgcgtaatttgcgccagccgttgattgctctctcttgaggcatcagggccaggtagcggcgccagacgcgcggcataatagcggcacaaacgctgaaccccaaatacctgagcggcggtcagcgcggtgctcatacgttcataggtgctaaacgtatgaagccggtcgttgagaaccgtgcggggaaataagacatccgccaactggtgagcgggctttaaccatgactcaaaaggcgtcaacgcggtttctgataccgttaaatccagtaaaaaacgatcgttaacatacgcggcttccggcatcagcgaaagcgggggttgtgacgacatagtggattgtgtttcatgataccagtggcttttacccgcttttcggcattgttccatagggtttcccgaggatgaaatggcgatcgataatgattcggcgtcggatcgtttatgctggattatcctggcgtatgcgggaaagggatgaaagattgttaggtgataacaaatatcagaacgctatataacgagatgagcggtgagtgaggggaatggggcagcacagccgtgccgcccgctaataaacttaatgcgcttacttcagttccagttcattcattgccgcaatgctgaacccgccgtcaacatggacgacttcgccagaaatgcctgccgagagatcggaacacagaaacgccgctgagttacccacatcttcaatggtcacggtgcgacgaattggcgtaacggcttcacaatgcgccagcattttacggaagtctttaataccggacgccgccagcgtgcggattggacccgcagagatggcgttgacgcgaacgccttccggccccattgcatttgccatataacgcacgttggcttccagagaggctttcgccagacccatgacattgtagttcgggatggcgcgctccgctcccagataagacaaggtcaacagcgcagaacccggattcagcatggtgcggcaggctttcgccatggcaacaaagctgtaagagctaatatcgtgagcgattttaaagccttcgcgggtaaccgcattaacataatcgccgtccagctgatcgccaggcgcgaaaccgatcgagtgtacaaaaccgtcaaatttcggccaaacgttacccagctccgcaaacatagcgtcaatgctggcatcttcagcgacatcacacggtaaaacgatgctggaacccagctgggcagcaaattcttctacgcggcctttcagtttgtcgttctggtaggtgaacgccagttcagctccttcgcggtgcatcgcctgtgcgataccgtaggcgatggacagtttactggccacgccagtgaccagaatgcgcttaccggaaagaaaacccatagctttaatccttatagtcattgcttattttttgcttttacgaacaatggttaacagcaacttttcaacattattcgaaattagtctgaaattatatcccactcctggccccgtgtgtcacgctatttttccgccgctatctccggcaggtgacgttctaaaaccacacggtaacgaagcccctgaggattttgagcactcccagggccaaactggcaaatcaaagagtctaatgggacaggccctagggtgcagtataccagctggtgtaaggttcgcctcatccaaccagagacaccgggacggatagcaagtacgatagcgatgcgctttccaccagacaaataaaggttctgtaggaagcctgaatattcatccaaatggtttacctcacctattagcggtgttatggacatgtaattttaaccagcaaatgcttaacaaaaataatttcttttttaagcgctgaaggttttctctatttattgatgcagagtaatactgaatatgaaaaattttggaaatcaggtgattacagtagttacaaaccaggtttttatatgtttgcatgtgtattataataaattttcagaggatgagacatatgccgtttacatttcatatcggaaatcatagttgccagatatcagaaaggtatttaagagatatcatcgataataaaagagaacatgttttttcaacgtgtgagaaatttatagattttttcaggaatatatttaccaggcgaagtttaatttctgattatagagaaatctataatctactgtgccaaaaaaaagagcatcccgatattaaagggcctttctctccaggaccattttcgaagcgagatgaagactgtacacgatggcgcccccttcttggatatattaaacttattgatgcctccagacctgaaacaatagataaatacactgtagaggtattagcacatcaagaaaatatgttactactacagatgttttacgatggagtattagtgaccgagacggagtgttctgaacgttgcgtcgattttttaaaagaaacgatgtttaattataataacggggaaattacgcttgccgctttgggtaatgataatctaccgccgagcgaggcaggtagtaatggaatctatgaggcttttgagcaacgtttgataggcttcctgaccacgcccgccacggcgtctggtgatgagagcggcgctattgatcagacggatgcatcacaaccagcggcaatagaggcgtttattaactcgccggagtttcagaaaaatattcgcatgcgtgatattgaaaaaaataaaataggtagcggaagttatgggacagtctatcggttacatgatgactttgttgttaagattccaattaatgagcggggaataaaagtggatgttaactctcaggaacatcgtaattgtcatcctgagcgtgtcagtaagtatttgaatatggccaatggcgacaagaatttttctcgttcggccatcatgaatattaatggtaaagacgttacggttttagtttcaaaatatattcaaggtcaggagttcgatgttgaagatgaagataactatcgaatggcggaggcgcttcttaaatcccggggggtttatatgcatgatataaatatcttaggtaatattctggttaaagagggggttcttttctttgtggatggcgatcaaatcgtgttatcacaagaatcacggcaacagcgaagcgtttctcttgcaacaaggcaactggaagagcaaattaaggcccatcacatgataaaattaaagcgggccgagaccgaaggaaatactgaagatgttgaatattataagtcacttattacggatcttgatgcgttaatcggagaggaagaacagacacctgcgccaggaagacgttttaaactagccgcgccggaggaagggactcttgtggctaaggtattaaaggatgaattaaaaaaatagcatttagttccgttcttttctgcgaatcgccgggggcacattcgctacagatttaccgatcaattattgagagttgctattcgcttaaaggtcgttcgggggatctggacagcctgtagcggagatgcaactcgccactagggttggcgatgccgcgctgccatagtgggtgaaatgcctcgcaatggtgtaacaacattaactcgccttgatttttcccctctgcctgacaagaaaaacctggctttacggatggtctcatgccgtcgtattagcgttgttcggcgtagtatgtaaatttccttatagcaatagaggaacattctcaaaacataaaattagcaagttatcatgaagttaacatatattgtttttttcgatcattttttatatattgatcgtttttattgattgatttgcgttaaaagcgcattatcagggagttaagatcaagtggagtggtcacatgcgctatttttttatggcagagccgataagggcaatggagggggatttactgggtgtcgaaatcactacccattttgcatcgtcgcccgctcgtccgctacaccctgagtttgttatctcgtcatgggacaattcgcagaagcgccgttttctgcttgatctgttgcggacaatcgcggccaaacatggctggtttctacgccacggcctattctgtatcgtaaatattgatcggggtatggcgcagcttgtccttcaggataaagatattcgcgcattactacacgccatgctatttgtggagctgcaggtcgctgaacatttttcatgtcaagataacgccttaatcgatcctttaatacacgcgcttcataagcaacctaatccattatggctgggcgacctgggcgtagggaatgcaactgctgtgccattagtttgcgggtgttttagcggcgtaaaacttgatcgcagcttttttgtctcacaaattgaaaaaatgacgtttccgctgcttgtcaaacatatccggcgttattgtgacaagatcgtggtggggggccaggaaaacacacgctatttgccggtgttaaaaacggcaggcatttgggcaacccagggcacgttatttccttccgttgcgttagaagaggttgaaacattgctgttgggcagtcgcatgaacaccctcagagaatcgaactgagggtatttgtttcgcttagcgatcctttcgccatgcgtcagcggtcagcgcctcgccaaaatggcctgcgattaaacggcgggtaagctcatgtagcggagaggcgagcacatcggcggtgctgccgcgttcaaccacttccccctgatgcatcactaatacctgatcgctaatatgcttcatcatgccgatatgctgcgtgacatagatataggagatgccttgcttttcctgcaattcaagcatcagattgatgagctgcgagcgcatggacatatcaagcgaagccagcgcttcgtccgcgataatgactttagggcgtaaaatcagcgcgcgggccaggcccagacgctgtttctgccccggcgccagcatatgcgggtagtagctcacgtgatcgggcaatagccccaccatacgcatcgtctcgacaatctgtttgcgccgctgttccggctccagatcggtattaaggcgcagggggaagtcaaggatctgcgaaatacgttgacgtggattcagtgacgttgaggggtcctgaaaaatcattcgaatacgttggcttcgaaacgaatagtcgccgtaatgcaggggatgatcgtcaataagaagctcgccgctggtgggttcaatcatgccggccagcatctttgccagcgtggatttgccggaaccgttttcgccgataatggccagggtctgacgctcacgaagcgtaaagcttaatggtttcacggcgtcgacggtctggcggcgaaaccatcctgtccggtagcgaaaggttttactcaggttgcgcacttcaagcagagtttccaccatatcactctctctccatattcagcggaaaatgacaggcatagagatgatttttcgcgccggttaagcgtggcgtgataatgcattctcgttgcgcgtaagggcagcgcggccccagacgacaacctatcggtaactgctccagtagcgggatcgcgcccggcagcgtattgagacggcttttatgcggcatcgcgctgccaaaatccggaatcgcacggataagcgcctgcgtataaggatgatgtggcgtcgtcaccagatctttacttggcgcggtttctaccgtctggccgcagtataaaacgttgattttgtcagcccactgactcagcatttgcaggtcgtggctaatcaacagaatggtggtattactgttttgattcagtcgcgtcaacaggcgaaaaatttgcgcctgcgtcgtcggttccattgagttggtgggttcatcagcgatcaggagtcgcggttgattcgccagcgcgatagcgatcataactttctgacactcgccatcggtcagttcatagggaaaactgcgcatcgcgtctttatgatctttaattcccacccggtgcagtaattcaattgcacgccgtttacgccagcctaaacgctgccaccagcggcctttataggtccaggcgggaatattttgcattaactggcggccgacgcgttcggaaggatcaaggcacgactgcggctcctggaagatcatcgacacattatgtccgaccagcttacgccgttcacgtgaggagaggcgcagcagatcgatatcatcaaaacgcatacggtcggcagtgactcgccagttgtctttcgcgacgccgcaaatagctttagcaatcaagctctttccggaacccgattcacctaccaggccgcgaatttcaccttcgcttaatgtcatactgacgcgatcgaccgcttttacccaaccttcgctggttttaaattcaatggtgagattgcggatatccagtaacggcattattccacccccgcaataatcgcacgacgaatcccatctccgagcaggtttaccagtaaaacactgagcgttatcgccgcgccgggtagcataacggtccacggcgcgacatagattagctccagcgcatcccccaacatggcgccccattcaggagagggaagctgcgcgccgagatctaaaaatcccagcgcggcgatgtccagaatcgccatcgacagcgcccgggtaatttcggtgaccagaccggcggtaatattcggtaaaatggcgaaccacagaatattcagcgttgtcgctccatccagacgggcggcaatgacgtactctttttccagttcatcatgcaccatgctgtagacggaacgtaccattcgcggcaacagggccagccagacggcaaacatcgcgtgtgacagatgtgggccggcaaatgccacgacgataatcgccagcaagagcgaagggatggaaagcagcgtgtccagaatatggttcagcacggcagagcgtaaaccgtgcgtcgcgcctgccactacgccgaggactaatccacatagcgtagccgccagcgttacgataaacgcgccgccgaccgtgggcgccgcgccgcttaacaggcggctcagcacatcgcgccccagatcgtcagtccccagaaaaaaggagacttcgccatagcgtgaccaggagggtggcagtagctgatagcccagaaattgctgatcgataccatagggcgcgatccagccgccaaaaatacacagcaacgccagaccggcgcatccatacagacccaccatcgcaggcgcgtcgctataaaatttacgccaggcagtgcgcagggtgcctggcgggcgcttttcgctgtatacgctatcgtaaggcataccattccttatgtttcagatggttagccatagcacccaaaatatcggaaatcacattgaccacaataaccagcgacccaatgaccatcacgccagcggaaatagcggcatagtcctgctgacgaatggcgtgaattaaccatcgtcccagcccaggccagctgaaaaccatttcggtaatcatcgccagcgttaacatggttgaaaactgcagaccaagacggggaatgaccggcggcagcgcattatgcaacacgtgacggcgtaaaatcgtaaagcgcgataagccgcgcgtggccgccgctttaacgtagttctgatcgtagacctcaatagtgctgattcgcatcaggcggatcacttctgtggtcggcgcgacggagagcgtgagcaccggtaaaaccatatgccgtatggcgctcatcaccatttcatcacgccatggcgaatctgaaatccaggcgtcaatgatggcgaaaccggtaaccggtttaacttcataaagcaggtcaaatcgcccggataccggcagccaccccagcgtgagcgaaaagaacagtgtgagcagaagcgccagccagaaaaccggaattgagaaacctaatagcgccagcgcgctgataaaacgatccggccatttgctacgcgtcacgccagccagcatcccgaccgggatgccgaccatcagcgcaaaaccaaaggcgagaatgcacagctccatcgtggcgggaaacacctctttaagctgttcggagatcagctggccgttaatgctggacacgccaaagtcccagtgcagcagaccgttgaaccagaaaacccaggcattccataatgatgcgccttgtagcggcgcgtgcggcgtaaaatagctcaggctaaagccgataaaggtcaggaagaatagcgtcaccagcaacagcaataaccgacgcagggtgaagataatcatggttttttcacctcttcgtgtttttcgcgggagacgccggcaaaagacgcattgccgaacgggcttaacaccagccctttaatatcgtagcggtaagcctgcaggcgtagtgatgatgccagcggcagtatcggcagctctttctccaggatattctgcgcttcctcatatgcttctatgcgcgaagccaactgctgcgacgacagtgctttacgcagcacgctgtcaaattcagggttacaccagtgggcgaaattggtttgcgaattgatggccgcacagcttaacagtggtctgaaaaagctatccggatcgttgctgtccgtggcccagccggataaggtcagatcgtgattcatatccatcaggcgcgcctcctgaaaacgaccttcaaccggcacaatgaccacttttacgccaacctgcgccatatccgcctgaataagctccgccgtttttagcggacttgggttccaggcctgagaactggtcggcacccagagatgcagcgtaagattctcaatgcccagcgcttttagctgttcgcgcgatttttccggattgtactccgtaattttggcatcgttatcgtaagcccatgaggctctcggtaaaatggaggctgcggtttccgccgtgccgtaataaatcgactgcatcagacgctggttgttgatcgataaggccagcgcatggcgcactgcgggattattcaacggcggcttatcggtgttaaaggccagataggcgatattcatccccgggcgcaacgtcagacgtaaacgcggatcgtcgcgtaaaatagttagctggctggcggcgggccaggccagaacatcgcattcaccggtcagtaatttcgataaacgcccggtaccgccggagcctaaatccactaccacttgcggcatcagcggtttgccgcgccaaaacccatcgtggcgctggagacgaataaactgtccggcacggtactccgaaagctggaaaggcccggtgccgaccggttggcggtctagcagttcctgacgatcttttcggctaagctgcgcggcgtactcagcggacatgacggaagcgtagtgtgtagccagatgccataaaaaggaggcgtctggctgcgtcaggcgaaactcaacggtgttattgtccagcttacgcacgctttttacattgtcggcgaactgtaggctatcaaagtaggggaagctactgccgttgatgttatgccacggatgccgacgatcaaaaatccgctgaaaggtaaagacgacatcatcagcattgagttttcgggtcggcgtaaaccaggcggttttttgaaaggaaacgtcgcggcgcaggtgaaaacggtacgttgccccgttatccagcacttcccagctttctgccagctctgggactaaacgataagtatagggatcgacatccaacaggcggtcatataactgggctgccagggtatcgacgatgaggccgctgctcgctttttgcggattaaaggtgttgacctgcccgctgacacaatacacaaagccgctatcgcgaatatctgcactcgcagtttgttcgggcgcagccgcagccgtagcctgactactcagtagacccgctatcacgatcagagacgataaaaccaggcgcataatagttaagtttttgaagttcaatttgcaaagtgtatcgcacttcggcccgccacgtaaaaatgtcggtggataactggcgtaaatgtcgtcaattagccggagaaatagctaaagctgatgctttttaagcaaggcgcgaaactggtggtaggtgagtgccagcaaatcggcggctcgtttctggttaaatttcgcctgttgtaagctacgttgcagcagcgctttttcctgttgcagttgaaactcccgcaacttgagcggcaggtcaggcgtggcggatgccgctggcagggcgggcgtgggcggttcggcggaatggcgttgaaaaggatcgataacaatttcatccaaaggatgttcactgctgccgtggcgatacactgaacgttcgactacgtttttcagctcgcggacattacccggccaggcgtaatgcaacaacgtttcttttgcccgatcggtaaaaccgggaaataagggcagacgtagctcacgacacatctgaatagcaaaatgctcggctatcagcataatatcgctttgacgttcgcgcagcggcggcagttgtacaacgtcaaaagccagcctgtcgagcagatcggcacgaaatgttccttcctttaccatggcgggtaaatcggcattggtggcgcatactaatcgcacattaacctgtaacggctggctgccgccgacgcgctctagctcgccatattcaatcacccgcagtagcttttcctgtaccagcattggcgctgtcgccagttcatccaaaaacagcgtgccgccatcggcgcgttcaaagcgaccgggatggcgtttttgcgccccggtaaaagcacccgcttcatgaccaaacagttcggagtccagcagattttcgttaagcgctgcgcagttaagcgagataagcggcccctgccagcgtgaagagagatagtgcaggcgattggcgataagttctttacccgtaccgcgttcgccaataatcagcactggcttatccagcggcgcgagccgggagacttgttccagtacttcaagaaaacggtttgcctcgccgagcaggttatctttaaattcagccatgatgaaaatcgccacttgttagtgtttttcaccactttatccttttttgctggcgaggtaaaacgaaataattcctttactatcagtggtataaaaagttggcacgcaaattgtattaaccatgtagcagggcatcgcccgttatcagaacattatgtgaggattgaattatgggtattttttctcgttttgccgacatcgtgaacgccaatatcaatgcgttgttggaaaaagcggaagatccgcagaagctggtgcgcctgatgattcaggagatggaagatacgctggtggaggttcgctcgaactccgcgcgtgctttagcggaaaagaaacagttatcccgtcgcattgaacaggctacggttcagcagaccgagtggcaggaaaaagcggaactggctctgcgcaaagataaagacgatctggcgcgcgccgcattgattgaaaaacaaaagctgaccgatttaattgctacgcttgaacaggaagtcacgctggtggatgacacgctggcgcgcatgaagaaagagattggcgagctggaaaacaaactcagcgaaacacgcgctcgccagcaggcgctgatgctgcgtcatcaggcggcgagttcttcccgcgatgtccgtcgtcagcttgacagcggcaaactggatgaagccatggcgcggtttgaatcctttgaacgtcgtatcgatcaaatggaagcggaaagccatcgttttggtaagcagcaatcgctggaccaacagtttgccaacctgaaagccgatgatgaaatcagcgagcagctggcgcagttgaaagccaaaatgaagcaagataatcaataatgacaatggcggcgccgatacgcgccgtcgctcatcagctttaggtgtaaggagaacgcatgagcgcgctatttttggccatcccgttaaccatttttgtgttgtttgtgttaccgatttggctgtggctgcattacagcaaccgcgccggtcggggagaactgtcgcaaagcgagcagcaacgcttactgcaactcacagacgatgcgcaacgtatgcgcgagcgcattcaggcgctggaagacattcttgatgcagagcatccgaactggagagagcgctaatgggtggaatcaatctgaataaaaaactatggcgtatgccgcaaaagggcatggtgcgtggcgtttgcgccgggatcgccgactaccttgatgtaccggtaaaactggtgcgtattctggtcgtgctgtcgattttctttgggctggcgttttttaccgtagtggcctatatcgttctgtcttttgtactggaccctatgccggataatctggccgcaggcaaaccgcagccgaccagcggcgaactgctggataccgtagacagagagcttgccgcaggcgaaaagcgtttgcgagaaatggaacgctacgtcacgtcagatacgttcacactgcgtagtcgtttccgtcaactttaagtgttatatcgggaaggtgaagatgaatactcgctggcaacgcgtcgggcagaaggtgaagcccggcttcaaaatagcaggtaagctggttctgttgaccgcgttacgctacgggcctgccggcgtggcgggatgggcggtaaaatccgtcgcccgtcgtccgctaaaaatgttgctggcgtttgcgctggagccagtacttcgtaaggcggcgaataaaatttcgcagcgttacaaatagcgagtctggtcataatatttcgttaagctctggcgtatagtgtgtgcgaaatacattacgtgtcaggacggaagtatgttgaaaaaaggaatatttgcgttagcgttattcgtagccatgccgctttatgccgcagaatactggatagatgtccgcattccggaacaatatcagcgtgagcatattcagggcgcgattaatatcccattgaaggagattaaatctcatatcgaaacggtagttccagacaggaacgatacggtaaagttatattgcaactccggacgacagtcgggcatggcaaaacaaatgttgcttgatatggggtatacgcacgcgatgaatatgggcggcatcagtcgtcttgatatgccgaaagtaaaaaaatagataatctattgctcaatactcatactaaccgcggcgcttaatgcgccgttgttgatctctccgggtagttgataataacgtttttgcacatatctataacgcaggctcgttattattttttcttctcttcaggctcaacaggatgtcaatgaagcgacttaaaactgaactcaacgcgctggtcaatcgtggggtagacaggcatttgcgtcttgccgtaaccgggttgagccgcagcggtaaaacagcgtttatcacggcgatggttaaccagttgcttaatgtccacgcgggcgcgcgcttaccgttgctcagcgcggtacgcgaagaacgcctgcttggcgtaaagcgcgtgcctcaacgtgattttggtattccccgttttacctacgatgaggggatacttcagctttatggcaatcctcccgcatggcccacaccgacgcgcggcgtcagtgagattcggctggcgttgcgctatcgctccaacgactcgctgctgcgccattttaaagatacctcgacattgtatctggagattgtggactatccaggggaatggttactcgatctgcccatgctggctcaggattatttaagctggtcccgtcagatgaacggcttgttacaaggacaacgcgctgagtgggccgcaaaatggcggcaactttgcgacgggctcgatccgctggcacccgccgatgaaaaccggctggcggagattgccgccgcctggacggattatttgcatcagtgtaaatcgcagggattgcattttattcaacctggacggtttgttttgccgggcgatatggcgggtgcgccagcgttgcagtttttcccgtggccggatgtggacgccttcggcgagtcaaaactggcgcaggcggataaacagaccaacgctggaatgctgcgcgaacgctttaactactattgcgaaaaagtggtcaaagggttctataaaaatcattttctacgctttgatcgccagattgtactggtcgactgtctgcaaccgcttaatagcgggccgcaggcgtttaatgatatgcgtctcgccttaacgcagttgatgcaaagttttcactatggccagcggactctgtttcgccgcttgttttcgccggtgattgataaattgctgttcgccgcgacgaaagccgaccatgtcaccctcgaccaacatgccaatatggtggccttgctccagcagcttattcaggatgcctggcaaaatgccgcgtttgaaggcattagtatggattgcctagggctggcgtcggtacaggcgaccaccagcggcgtgattgaggtcaacggtgaaaaaatcccggctttacgtggaaaccgtttgagtgacggcgcgccgttaaccgtgtaccccggcgaagtgccttcgcgtttgccgggacaagcgttttgggatagtcagggttttcagttcgaagcctttcgtccgcaggtgatggatgttgataaaccgttaccacatattcgtctggacgctgcgctggagtttttaataggagataagctgcgatgagcgaaccgttaaaaccgcgtattgattttgcagaaccgctaaaggaggaacctacgtcggccttcaaagcgcagcaaacttttagcgaagcggagtcgcgtacatttgcgcctgcagctatcgatgagcgcccggaagacgaaggcgtggcagaagcggcggtcgatgccgcgctgcgccccaaacgcagtctgtggcgtaaaatggtgatgggagggctggcgctgtttggcgcgagcgtggtcgggcaaggcgtacagtggacaatgaatgcctggcaaactcaggactgggtcgctttaggcggctgtgccgcaggcgcgctgatcattggcgctggcgtgggatcggtggtcacggagtggcggcgattatggcgcttgcgccagcgggcgcatgagcgcgatgaggcgcgtgaactgttacatagccatagcgtcgggaaaggtcgcgcattttgcgaaaaactggcgcagcaggcggggattgatcaatcacatccggcattacaacgttggtatgccgctattcacgaaacgcaaaacgacagggaaatcgtcggcttgtatgcgcatctggtacagccggtacttgacgcgcaggcgcgacgtgagattagccgtttcgccgcggaatcgactctgatgatcgccgtcagctcgttagcgttggtggatatggcgtttattgcctggcgtaatttacgcctgattaaccgcatcgcaacgctgtatggcattgaacttggttattacagccgccttcgtctgttccgtctggtgttgctgaatatcgcgttcgcgggggccagtgagctggtgcgtgaagtcggtatggactggatgtctcaggatctggccgcacgcctgtctacgcgcgcggcgcaggggattggcgcaggtctccttaccgctcgactgggaataaaagcgatggagctatgtcgaccattgccgtggatcgataacgataaaccacgtctcggtgattttcgtcgtcagcttatcggtcagctaaaagagacgctgcaaaagagtaagtcgtcgcctgagaaatgaccttccacagggcgctgattgcctggctttacgccgcagcgcccgtttttccgtcatgctgtcaatatttgttgacagaatccttcctgccagccgaatagtggcttatcatctatttaatggttcattattcaggtgaaggttcccatgcgtctggaagtcttttgtgaagaccgacttggtctgacccgcgaattacttgatttactggtgttacgtagcattgatttacgcggaatcgagattgatcccattgggcgaatttatcttaattttgctgagctggaattcaccgacttcagcagcctgatggcagaaatccgccgtatttccggcgtaacggatgtccgtaccgttccctggatgccgtccgaacgtgaacatctggccctgagcgcgctgcttgaggcgttgccggagccggtgctctcattggatatgaagagtaaagtggagatggcgaacccggcgagttgtcaactttttgcccagagccaggagcgaatgcggcaccataccgccgcacaattaatcaacggcttcaattttcagcgctggctggacggtaacccgcaaagctcccataacgaacatgtcgtgatcaacgggcaaaacttcctgatggagattacgccggtacatttacaaaacgaaaatgacgaatacgtgttgaccggggcggtcgtgatgttgcgttccacgattcgtatgggacagcagctacagaatttgtccacgcaggatctgagcgcgtttagtcagattattgccgtgagcgcaaagatgaagcacgtcgttgagcaggcgcgcaaactggcgatgctcagcgcgccgctgctgattaccggcgatacgggaaccggcaaagatcttttcgcctatgcctgtcaccaggcaagccctcgttcagcgaaaccgtatctggcgctcaactgcgcttcaatcccggaagatgcggtagaaagcgaactatttggccatgcgccggaaggtaaaaaaggtttctttgaacaggcgaatggcggttcggtgctgctggatgaaattggcgaaatgtcgccgcgtatgcaggcgaagctgctgcgttttctcaacgatggtacgttccgtcgcgtcggcgaagatcacgaaattcatgttgatgtccgcgttatctgcgccacgcagaaaaatctggtggagctggtgcaaaaaggactgttccgcgaagatctctattatcgacttaacgttctgacgcttaatttgccgccgttgcgcgattgtccgcaggatattatgccgttgaccgaactgttcgtggcgcgttttgccgacgaacagggcgttccgcgaccgaaactgtctgccgatctgagtacggtcctcactcgttacggctggccgggtaacgttcgccagcttaaaaatgcgatttaccgggcgctgacgcaactggaagggtatgagctgcgtccgcaggatatcctgctgcctgactacgatgccgcgacggtggcagtcggcgaggatgcgatggaaggctcgctggatgacattaccagtcgttttgaacgttctgtcctgacccagctttatcgtagctatccgagtacgcgtaaactggcgaaacggttgggggtatcgcataccgcgattgccaataagctgcgtgaatatggtctgagccagaagaagggtgaagagtagaaaaaaagaaggcctccggatagaggccttcttgtgacaaaagagcaccgcctgtagtactgacaaacgtagcgccagcaggcgctggcttatgccttcaggacattaagcgcggcgtcgtaatccggctcgtgggtgatttcatccaccaactggctgaaaataacgttgtcgttttcgtcaagcacgatgactgcgcgcgccgccaaacctttcagcgggccgtcaacgatttcgacgccgtagtttttcagaaactcgttattacgcagagtggaaagcgtaataacgttgctcaggccttccgcgccgcaaaaacgcgactgtgcaaaaggcaggtcagcagaaacgcacaatacgacggtattctccacttctgtggccagttgattaaacttacgaactgatgcggcgcatacgccagtatcaatgcttgggaaaatattcagcactttgcgtttgcctgcatattggctgagggaaacgtcagacaaatcttttgcgacaagagtaaaagcctgtgctttgctaccagcctgcggaataacgttggcaacggtgaccgggttaccctggaaatgtacagtctgtgacataattatgttcctatttacttatagttaacgtcgaaatccagtttaagtcattattcattaacacggcaaatactatttgtagcaagccgcgtccggcgctatcagaggggaagagatgagatctgttaaggtatatgaggaaacctggccgttacatacgccttttgttattgcgcgtggtagccgaagcgaagcgcatgttgtcgttgtcgaactggaagaagaggacgtaaaaggcatcggggaatgtacgccatatccacgttatggtgaaagtgatgcctcggtcatggcgcaaatcatgagtattgtgcctcagttggaaaacgggctgactcgcgaagcattgcagaaactgttgccggcaggcgcggcgcgcaacgcggtggatagcgccttatgggatttgcaggcccgccagcggcagcaaagccttgccgggctgctcggcgtgacgctgtccccggtttttactaccgcgcaaacggtagtgataggtacgccggaacagatggcagccagtgcggcggcactatgggaaaaaggggcgacgttgctgaaaattaaactcgatgctcgtctgattagcgaacgtatggtggcgatccgctcggcggtgccggaggcgacgctcattgtggacgccaatgaatcgtggcgtccggaggggctggcggcgcgttgccagttactggcggatctgaatgtcgcgatgctggagcaaccgctgcccgcgcaggatgacgccgccctggaaaattttattcatccgttgcccatctgtgcagatgagagctgccatactcgcagtagtctgaaagccctgacggggcgctacgatatgatcaacattaagctggataaaaccggcggtctgactgaggcgctggcgctggcaacggaggcgcgggagcaaggattcggcctgatgctgggctgtatgctctgtacatcaagagcgattagcgccgcgctgccgcttatgccgcaggtgagcttcgccgatcttgatggcccaacatggctggcggttgatgttgagcccgcgctacgctttacgacgggtcaactccatctttaggatgccagcggagcagattcgacatagccagcaagtatttttcgctggcttcatcggcagaaacagggggaaactcggcggtaatgcagtgcaggttgaggtcggcgcaccagctgccaaacgaaccgggcgtttcgtaacctacgctggtcaccagcggcaacgcaaacgcatcggccagccactcgcctagctcgctgcgacgtggatcttcaatgcaggctagcggatcgtgaaaagagacgacccaggcgggttggagtcgatgaattaactggcaaagcgcctgggtttccggttctgagccgggatggtcgccggttagcagcacgacatcacgctcttgcgcgcggctattccagcgataaactgtctcacccgctttccagttggcggcgggaaagttacggtttagatcaacgccattcgcatttgcccttaaccccagttgacagccatcaggattaacggcaagtacgacatgatgacggcgaagggttggatttaaggtgcgtaacgcacaggagagcgtcaccacggatgaggtttcatccccgtgggtgccagccagtatcagaccgctttcgcgattggctgcaggtgccggaaaccagattagcggcgcgcctagtagcgaacgtccataatgttcagtgcctggcggaaatgcgccgcgctcggcacgggggcgggtgacagtcatacgcgtttcccgaagctgagaccagtagggtaatcatcgtagtgttgtgtaaaacccgccgattatcaaatggtttctatttaccctcttgtatggcgcgatatcaactttctggcggaagataattgcatttctttttgctgaaacaaataattacgttgtcatttaactcatctttgaggaacttctatgagacattctgtttcagtaacctgttgtgcgctgttggttagcagcttttccctggcatatgctgcggatgttcccggcggaacggtactggcagaaaaacaagaactggtgcgtcatatcaaagatgagcccgcttcgttagatccagcgaaagccgttgggctgcctgaaattcaggtgatccgcgatctgtttgaagggctggttaaccagaacgaaaagggtgaaattatccctggcgtcgccagccagtggaagagcaatgataatcgtatctggacgtttacgttgcgggataatgcgcaatgggccgatggaacgccggtgaccgcccaggattttgtctatagctggcaacgtctcgttgatcccaaaacgctttcccccttcgcctggtttgccgcgctggctggcatcactaatgcgcaagccattatcgacggtaaagtcacgccggatcagcttggcgtcagtgccgtggacgcgcacactttgcgtgttcagcttgacaagccgttgccctggtttgccagtctgaccgccagttttgccttttatccggtccaaaaagcgaatgtcgaaagcggcaaagactggatgaagccgggaaaactgattggcaatggcgcgtatgtgcttaaagagcgcgtggtaaatgaaaaactggtggtcgtgcctaatacgcattactgggataacgcgaaaacggtactgcaaaaagtaacatttttacccattaaccaagaatcggctgcgacgaaacgttaccttgccggtgatattgatatcaccgaatctttccctaaaaatatgtaccagaaattattgaaggatattccagggcaagtttatacgccgccgcaattagggacttattattatgcgtttaatacgcagaaagggccgacggcggattcccgcgttcgtctggcgctaagtatgaccattgatcgccgtttgatggcggaaaaagtcttaggtaccggtgaaaaaccggcctggcattttacaccggatgtcacggcaggatttaagcccgatccttcaccgtttgaacaaatgagccaggaagaacttaacgcccaggcgaaaacattgctgcgtgcagcaggctacggatcgcagaagccgcttaaattaactctgctttacaatacctcagaaaaccatcagaaaatcgcgattgcggtggcgtcaatgtggaagaaaaatctgggggtggatgtgaaattgcaaaaccaggagtggaaaacgtatatcgacagccggaatacaggtaattttgatgttattcgcgcctcctgggtgggtgattacaacgaaccgtcgactttcttatccttattaacgtccacgcatacggggaatatttcacgctttactaatccgacttatgacaaaatcctgacgcaagcgacgatggaaaataccgccgaagcgcgtaacgcggattacaatgcagcggagaaaattttaacggaacaagcgcctatagcgcctatttatcagtataccaatggccggttaattaaaccgtgggtaaagggataccccattactaacccggaagatgtggcctatagccgtacaatgtatatcgtgaagcactgatgcgtactggtttcttgttaactcaaggtagccaagcccgccgcctgatgctggcagaaggcatggggattaagcgagcgcctgatgccgccgttctcattgctgtgttttcagccaggcggcaatatcctgtgtcggcagatgatgttgtgcattccaggtgtcactcatcggccaccacataccgtcaccacgcgcgaaggcgacgcgatagcgcagcattgggtcatgcggatgtaaacggagctgctcctgtaagtcaggtagcgtcaatacgcctcgggtaaaagtttgctgcgtcacgcgttcgaccgtttccgccagttttgcataagaggtcgtttcccccgcgacaaagacgacttcgttagtgatacgcggctgatgcagataaatttcagtggtcaggcgaccaatatccgtaggcgacgtgacggtgacctgcatttcccatccgccgagggcattgatggttttttgggctaagttgaccacaccaaaggccggttcgaagagaaaagaggtaaatataccggttgaaacaatcacccactccgtgacgttttgctcgcgcaaaagcgtcctgacgtcatactgttcgtcccacaccggctggccactacctttgccgaccacatcgtaattcacgccaaactgccaggggaaatagcgcttaacgcccgcctccagtaccgcgcgggtgatttttatctgggtacccgcaccggcgacaaaccccatacaattgatgatcgtatcaaaaccgtggaattgatcttttaacgctgcaaccgaactgcctgcgatgtcgaccgggataaaccgcgcaccggcatccgccagttgttgatgaatgctggaacgtcgtttgctctgtttatccctggatcgccctgacacaataacgcaaacggaaccattacgctgtgtgaccgccggaaccaacgacgccagcactgacgcccccagttgtcccgcgcccagcaccaatactttttcacccacctgattattggattgtttcatttgcacctctctgtgttgattcacctgtagatagagattacgtcagggatctgcgttcgataagacgccgaagacgggttagactgttctgataaatgggataattggcggggggaaaatggacaagctggaagcgatgcaggtctatgtttgcgtagtggatacccatagttttatcagagccgccgaagtgcttggcgtgccgcgctcaacggtatcgcgagtggttaaagaactggaatcctggcttaagattcaacttttgcaacgtacaacccgcaaacttagcgtgaccgcagaggggcggcgttactacgaagagtgcaaaagagtgctggcagatatcgcggccatggagtcgtcatttcccggccgggcggcacaacccaaagggcgttttaaagtggggatgccgcaatctctcgcccggcattgcattattcctacgctcccggcctttttgtgccagtatccggagctggagctgatactttgttccagcgatagcgtggaggatattatccttcaagggtatgactgcgtgattcgggccggcagaatcgatgattccaccacgctggttgcccgtccacttgccagctttaactgggtgatagcagcatcgcccacttacattgagcgttacggtagccctgaaaatttagatgatctgcaaaaacaccatgcggtcggctacctgaaccaccgcaccgggcgtaccaccgactggttttttacgcgtgagggggaggattacgcgatgcgggtgcaggagacgctggttgtcgatgatacggacgcttatattcaggccggaatacaggggctggggttaattcgcgtcgccagctatctggttgcgccgtatctgcacagcggggcgctggtgacctgcatggacaaccatttttatgatttgccgcttgcgctggtctatccgcaaaacaggtttctgccgcctgcggtacgcgctttttatgactggtgcaaaacggcgctgaaccagccggagcctcttcgctaaaaatattattccggatatcgcattgcctgttcagaaaactttttcacagacggtcaaaatgacggtactggtttttgacgcataagtaaaaggcattatcaaacaggtgctacacggcgaggatatagcaagcacggaacgtttggatgcaataaaaaatctgtacaactgttattaatgaactttttgtataaatataatcggatttaacaatactcattgtacctgtattttgctcttatcatggcgtctttacgacgaaagggtgctttagcgtggaatattcaatattaagtaacaaccttaaaatgcctatggtgggttttggcgtttttaaggtaaccgacaaagaagaatgtcagcagtcagtgttaagcgctattcgcagcggttatcgtcttatcgataccgctgcggtatacggcaatgaagatgccgttggtgacgctgttcgtaaagctatcgcgacaggtctgtgtacccgtgaggagttatttattacttctaaactgtgggtgcaagatatggctaactacgatctggccaaagcaggtattgaagcgtcgctgaaaaaatccgggttagattattttgatctctatttattgcatcaggcaatgggcgattattttagtgcgtggcgcgcgctggaagacgcttatgaagccggtaaactaaaagccattggcgtgtccaacttctatgcgcatgtgttagccaacttctgtgaaaccgtcagaattacgccaatggtaaaccaggtcgaattgcatccatactttgcacaacccgccgcgctggaaaccatgaagcattataacgttcagcctgaagcgtgggcgccgttaggcggcgggagacataaaccgtatgaaaatgtcatgcttcaaaggattgccgatgcccatcaaaaaaccatcgcgcaggttgtcctgcgttggaacgtgcagcgtggtgtcacggttattcctaaatccactcgacaggaacgcattgaagagaactttgccatctgggatttctcactaacggataatgaaatggctcaaatcaacgcccttgatttaggctacgttggcgaagcggtgaagcattttaatcctgaatttgttcgcggttgtcttggcgttaaaatctacgattgatcccggcgcttgcggatgttttctcgcatgaacagcttctaacacggttgccggagcgtagacggcaaccgtgtgatattcgcctggccgtcaggcgccgaaggcaccatcgatggtgtgcatcgcgccggtgacgaaagaggcttccgggccggcaagccatgccaccattccagccacttcttcaggtcttccgtgtcgtttgattgccatgaaactgtgcatcagctctttcatggggccatcttccggattgatgtcggtatcaatggggcctggctgcaccacatttatcgtaatcccgcgggggccaaaatcacgggccaggccgcgcgccagcccttgcagggctgatttactggcggcgtacgcggccattcccggtacgggcatccgatcgccattcacggaaccgataataataatgcgtccaccttccggcatgttgcgggctgcttcgactgacgcatggtaaggcgcatggatattaatacggaacaaacgatctatcgcatcgctatcttgttccagcgcatcgccgaagagagccacgcccgcattgacgaccagaatatccagtggtccgtactcacgcacgaggctgatgacggcatcccgatcggcgctatccgtctggatggcggtgcttccggtttccgctgccagtttttcggcggcttcacgcgatccggcgtagctgaaaacgaccgatgcgccgtcagcgctaaagcgtcgtacaatagccgcgccgataccacgacttccccctaaaaccagtacagatttgttgcgaaatagcatcatcaggatgtcctttatgatattgtagtagccactacaatatgcgtaatgaaatcatgccgtcaaggagttatgtagtaatgactacaaaacatagccgaacgccgggtcgccctcgccagttcgatccggagcaagccattgaaaccgctcaacacttatttcattcgcgcggatacgacgcggtgagcgtagcggatctgacaaaagcgttcgggatcaatcctcccagtttctatgcggcgtttggcagcaagctggggctgtatactcgcgtattaaagcgttacaggatgaccgacgcgattccgctcggggcgcttctgcgtcacgatcgcccgaccgcgaagtgccttatcgatgtgctgatggaagcggcaagacgttacgctgccgatcctgatgccactggatgtctggttctggagggcgctcattgtaacgataaaccggcacgagaggccgcctgcgagttttacatcgctgctgaaaacctgattcgcacttatgtcgccatgcggtatccgcaagaggctgaccggacgacggactttatggggacgctaatggcggggctttccgccaaggcgcgagcggggtatagcctggagcgtcttcaggagagcgtgcttctggctggggatgtgctggagcgattactgccggattaacgcagcgcatcaaaaaacctgagccagtcagatacggacaaacagggagcaatagccctaatcatccatcttgccgttgcggtattcggtaaagtacatcaaaaatagaggtgtcagggaaacaagaaatgcaaaagtgtagtcttattacggtacttagcttatcagtgttgatgctagccggatgtacaacgacctataccatgacgacccggacgggagagattattgaaacgcagggtaagccggaggttgactccgcaaccggaatgacgaaatacgctgatgtttatggttatcatcgcgttattaaaaccagtgaaatagtgcagacaacagaaggcgcatcgaagctggactggtaatgcgctaaagcagttgggaggccgtgtccagtatgggtaccggacggtttctgggcctgaattgaatagagcgcctgtatagccgaattccgggtatcggcttgatttgtgttgtcagttatttggttgttccctgtatagtgaagataaacagtactcatggctaacggtctgttttggattgctaactatcccggattctgcgcgttttatttagtcacaaccgtggttaagaatattttgggtcagacttacacgccgggtattaagataatccgtcgcatagagagcttgatcggcatcattcggttcaagaagaaacggcgtgactttaggtatgagatcagcaaagaggttatattgatccacagaggcaaaatgctgggtagcgctggcccagggcattcgcatcagctctgcgtaaggaggggatagttgaacaggcaaatcaaattctttcagattagcaagcatctccttactcatataaaatgtgaccctgtttcgcgaaaaggtgttaagcactgccttcagtcgtttaacttttgcttctttactcatgctattatcaaaaaaacgtggtgaaagcataatagcaatcgatgcatttgatgaaataacattatgtagtggtttcagggctacaacaatctgatcgtttgtgaagatacgctgcgtaccagaggaggtagtatagtttccacccagccagatcacataatctgttgttttgaggggaagcgttttttccggtatattacccctgtcaggtgccactgtttcaattgctagtgagtcttgtccccagacattatttactttagaactcaaaaaattatattctgaaatgttccttagttttagtagagttatctgtgagcgggtaaaaaagagattgaatctcactttgttctgcaattgccgaagtaatctgagcgtgttctgatcgatcagatgagtgtaaagaccaacagtttttccggaaagtattgctgaggcattgttcgcaagaagcatctcttttatagctccttgcccaataatcagtacgcaacggtatttttctggtctgattttatctatggggatatcggtaagattgaccaggtcaggagtgccatgccgccaattatcatgaatgactgtggctccggaggcgtctcctccggctcccctggtgataataagaggagggtgggtactggcatgtgcgatatacgaaaaacacgctaccattgctagcgttgtgtttctgatggttgtatacatatcgtctgccctgatttcgaaaatatgaataatgtctcctcttataatgtacatcaaaaagagagcattttaattaaacgttatctcaacgagataaaaggttagcacagtaaagtatagagagaatgtaatcataccaacattatagatgtgggagcatgaaggccccgcaagccgcccggccagcatactcccattaatagttaaagtatggactttgcttttaccgtaaactgtagccaatattacctgatcactacaccgtacagtactgtcagaaatctgtccccggtgtcgcgtgcacgcaagttattttttttcaattctttcaaaacgttaactatattaatagtcacttattttatcagaatcaatactgagggttttattaccgctctgaaaagagaaggcttttcagatgaaatgcgtggatggtacgaagtcattacagtacagggatgtaataataaagatcgacaatggattcattactctgttgcttttggacggatgccaaatggaagtattcaatatcttctccttctctcctgataagattcagttttggcaatatacacatatatattgtattggaaaattgttgatattgttctttatgaccaacgaaatggaattttgcatatttaccacattttattaccctcgacatgggtattttgcctccatcgacggaattatgttccataccaaaaaaactgcttacggcgatgacctggtctttggtattatccggcttaaaagacgagagacaatacacattttcgccccacgttctgagcgtctcatgaatgattttccattttataggcgacgcttttttaggaaggtcatttgttgcgatctgatgagacgtttgaaatccgaaaatttcttttgacgtaagctgacaaatttcgaactgataatgctcatcacagtcaagccagtagggaggccgtaggtttctgagatcccagaaatcagccttgcgatagttattgggattgacgccaaatgtttttttgaactctcgactataggactgcactgaatcaaaccccattctgaacgcgatatctgtgaccgactgagaggtcagctttagcagagtggcgcttctgctcaacttgcgttgtctgatatattttccgattgagacgccacacttttctttaaaaaaatcctgcaaactccttcgcgaataacctgttataacaaccagcttttcaatatcaatcctctcttcaagatttttttctatttgctctaatactgagattattatggcttttttcatcatcattcctctctattgaagccgaaaatataaaaatttaaggtgtttgacatactgtgttattaaactggtggggggttgttagcttttctggcaaaacaagaaagatttaaattgcttgacgtttctgaataaactttacacttggagatcggcttttgccagtaaagctaagtaattggcatggcgaagggcataatttcacaggcggttaaaatgattgaataaccctgaatttttagctcgtgagattataaatctcataattatttctaatgatttaataaaagggaattgttttgtacttcaaaagatctttattagcgttagcaatttgtgcatccgtggtctcagtagagacggtggcgaataccagagccaatgatatggcttcttctgctacacctgcttctgttggtcaccgtcctgtggcaactactaatgcaaaaaaaatagaagtgtctggggaactgacgaccggttcaaccctccagatagcggatgtttttattagggatgaggatggggatcccttatcgctggataaaatgaataatgccgacgatattaaatggtatctggtggataatgaggccgccgatccttctggaaccccggcggcaaccgggacggcttttaccattcctgctgatgcaggcggtaaaaaaattaaaatcgtttaccggattaagacggcaacggggacgccggatagtgcattcttgcctgccactgtcttattaacttctgcatcttctggggtgagcggcgactccgccgcagacggtacaatttctaataagctacgttctgtcactatcaatgtggtgaatgaaagtggtaaaccgactgatgaactcaacggtaccaatgacgccaacactccagtggtaggcggcacccttgaagcggtactggaatgtgccgccacagcggcggctgagtgtgaggtcagtaattataactttacctggcagatggcggatgccgggacaccagataagttcaccgatctgaataataccaacgctgaaaagcataaatatattattaagggaactgagcagaataaactgttccgtgtccacgttacgcctaaaacgacgaaagccacgccggagaataaacgcgctatccgtcgctgatggttatcgccaaataaacatcttatttaaatactccctctgccaggcagggggatatagcaggagacaataaagtggttttttctaaaaaacccattactaaatatataacctgggccattgttaccagtcagattccactgccggtcattgctgatagcgataatgaaattcagtcgtggattgcggggacggcatcgtctatttctccgcatctgcaggaggggacgctggaggattatgccaaaggaaaaataaaggcgttaccagggcaggccgctaatcatctggtgaacgaggggataaagagcgcttttccggagattattttccgtggtggcgtcaatcttgaagatggcgcgaaatatcgctcatcagagttcgatatgtttattcccgtccaggaaacaacatcgtctttactctttggtcagcttggctttcgcgaccacgacaacagcagtttcgatggccgcacctatgttaacgttggtatgggttaccgccaggaggtcaatggatggctgctcggcgtcaatacgtttctggatgccgacatccgttattcccacttacgtggcggcattggcggggaagtttataaagacagtctggccttttccggcaactattatttccctctcaccggctggaaaacgtcagcagcgcatgaattacatgatgagcgtccggcatatggctttgatctgcgaacaaaaggcacgcttcccgattttccctggttcagtggcgagctcacatatgaacagtattacggggataaagttgatctattgggtaacggtacattaagccggaatccccgcgccgcaggtgcggatctggtctggaatcctgtccccttgcttgaggtcagagcaggatatcgggacgccggtaacggcggctcgcaggcagagggcggtctgagagtcaactattccttcggtacgccgttacatgaacagcttgattaccgcaacgttggtgcgccgtcaaatacgactaatcggcgtgcctttgtcgatcgtaattacgatatcgtcatggcgtatcgggagcaggccagtaaaatccgcattacggcaatgccggtttcaggcctgtccgggacgctggtgacattaatggcgacggtagatagccgttacccgattgagaaggttgagtggtcgggtgatgcggaacttctcgccggactccagcttcaggggagtttgggcagcggccttatccttccacaacttccgctgacggtgaccgacggtcaggagtatagcctttatttaacggtgactgacagccggggtactcgcgtgacctccgagcgtatcccggtaagggtgacacaggatgagaccagtttccgttcatggataaatgttatcaatgacgatgttcaggttgaggacggcaactttgttatcagtacgccgcttcctgccggcgaagaggggaaggttattgagtggcactacgtgcgcgagcgctctgaagaggagtgggcgtcgctcaaaccacgtcatattaagtatcaatcagatatgccgggtctggcatttaaagcgctcggtggcacagagcgtgacggccattgggttgaacgggttctggtgacccatatcggcgatgatacccgctcgctcaaattacatattgaagcaagcggaccagacgataaacatccggtgaaggggaccgtactgctgcaagcgcagccagacagcattgcgcagaaggtcacttctgtggaggtgctttttacgccgggtactgaagaagccaacggaagcgttactgcgccagtcgtcggaacagaaatgcgagccagaacgctttgtgtaaataacacggactgtactgatgcgtttaattatcagtgggaaatctcggatgaaatgaaatcctggcaatccgtaccgggggcgacaaaggccacctggcttatcccttatagccttaatggggaatcgctacagaataaatatatccgcgtcagaattatttctgataaagaaaatgccaagagttctaccgcagcatctgatgcgaattaatgttttaaaaaggatcaacagtgtgtatgtcgaaacataatcttattatctatagcctgcttctggcggctgcgccgataagcgtcttggcggattcgtcgacaacttccgcggcaaccgtcgggatgttttctcctcctacggcgccgagcgttgggcacaggcctggaacacctcgcgatggctacgaattgaagtttaatggacttgacttttctattgaaaagtatacaccttttccgggaatgactattgagaggtatgccagaaatgtaggcatcagagatccggataataactatcagtctgcggaaacttttactacagtatgtacgtattatcagataaataaagataactctcagcatatacttaaacgtgaaaatccatgtgagcataaatttaatatccaaaaggaacatcggggttcaaagattaaactagaaatttataatgaaacggatatggcttcagcgtcagggtacacgcctgcgccatcggtatctgaatttcagtatattgaaacagaaactatatctaatacgccaagtcgagatttaacagttatgagtatagataagtctgtattatcgccgggtgaaagtgccaccatcacaactattgttaaggatatcgacgggaatcctataaatgaagtttacattaataagtctgtagcgtgtgaaattttagagtgcttatgggattatggtcctcttaagaaagaaaatgctccaggtaaatatacacaagttataacctatcgtgggcatagtaatgagcgtattgacatatcttttaaatattcagcggcttttacgaaaacaatttccatcagaggaagaccataaaactatattaatcattatgggtaatgtaattctttttatcaccatcatcttattatggatgtttacctggttttttagcggattgctaaataattattatggctaaaagaatacaaacgttaaaaggagaggtttttatgacaccagcaacaacacaagattatatttcattgggtcaggaacacgctgtcacctttggcaaaacgcaactgaccctcaaacccggtatactggctgaaggcgaaccattaccctgcacaaaggggctggtgagccataatttattaccgggttactgtatcccggggataaaaaagcggattattgtcgtcccgtcactggatacgccggtttgtgaatggcaggtaaaagactatagtaaccgccttaaatcagcgggtagccactcaaaccgggcggtatatgtgctgagtatggatacgccatttgctcaggcccgttttattctggaacatgatattcatcccggcataacctttgtttctgactacgcttgccgccagtttttggataattccgggctgaaaattaatgagctcagtatttttgccagagcgttgatagagtgcgatgaaaataatgtggttacgcgtgttattgtaccacgagatatcactcatcttcctgtttactaatcacttatatcagcaccgtccctgcacagagaaccgaataatcggcaatgcaggggcgcaggcatcctcctgtagtgcccccacatttaacacatatactattgcatcacgcataaggaactgaaaatgatgccagcggatggggcaggttaacgttatggcacccctgaatttctgcaataatcgtctggtaaccggaaagccacttatgactttgtgatttggcctgctggtgctgtaaattatttatcaatagctccattgattcgcgggtctgccagtaataattattaaccattcttccgctggcggcatcggtatagctttccatcccaatatagccatcaatagtctgtgtatagcgctcaatccagccatccagttgataaaactcttcgtcgtactcttttttttcgaaaataaaacttgtcagaaacagcgacatggtatttctcctgttacgcaatatcaatcaaacacccatcaacgtggattcaaaacgtaaacctggcatcattttttcaaggccgtcagtcagcatgtttcctgccgcgtacaattcatcaaccggcatttccggcaagctttcaaggataaaccacatcgctttatctgaagcgcttagtcgggtacgtactccctgacgccagttccagcgccgacaggtgacgcctctgtcatcgcgccagataacttcgcccggttctggcgactcggtgacgggttgtccttctttcagggtatcaaatgtttcacttccgtctgcgaaaaccagccgcggcgatccacaataagccgcgctattttcgccgcctaccggtacggcatagcgcaggctcacggcgttataaagatcaacgaccgggtccagcgccgccattgttccatccttcaacacgcgttttcgtagcgcttcagccgagcagggggtgcgcttcggttttgcgccgaatgctttaaacaccgcattccaggcgtctatatgcgcctgtgcccacgtcggttggccgttaattacggcctgacaggcctcttttagcgcgatttctccgacctgcgcatcgcgaatcggagcggcaataacattaatacttaatgcacgaaagccgggagcgatacgggccagttccgggctgattgacggtaacatagaagacatcgcataatcctgtaatgactattttcttctatgatatcgaccaatgaccaaaaaagtcaacttatcgaccacgacgggcgccgacgtcagcacaataaatgaagctgtttcccaacgtatcaaacaatttcgtagccaaaaaaagatgtcgctggatgagcttgcgcggcgttccggcgtcagtaaaggaatgctggtggaaattgaaggctgtaaagccaatccaagcattgcgctgttatgtaagatcgcggcggcaatgggagtgtccgtggcggattttgtcaacgtcgccagcgagccgatggttcatcttatcgaccgggatgctattccggtgttgtggcgcggcgagaaaggcggcagtgcaaaactaatggcgggaaccagcgggccggatatgctggaactctggcaatggataatgcatcctggtgaacagtttgaatcggcagggcatccggcagacacctgtgaattactgtttgttaatcagggaacactgacattaacagtcaatggtagacgctttattattcgggagggctgctccgctgtagccagaaccgacatgcctcatgcctacgttaacgacactaatgaggtgcttgaatttaccatgacggtgaatgaaaagagccgttgatcaccgtaaggtgctaacaacccgtcatccggacagggaagcctcggtgcccgataagcgttatcgggcaccggctatcttttattttgtcgcaggcgcggcctccgggtcatcgatatagagcgtctggcttgggaaggcgaagtcagcgccgttttcctggacaatcgcaataattttcaggtaaacatcctgctgtacggcaagccattcctgccatactgttgttttggtaaagcaatacaccataatattcagcgaagagtcggcgaattcattaaaatagaccaacagcgtctgtttctgatcgatatctctgtgcgcctgcagcatgtttctgatagcgtcaacaatgaggccaattttgtcggcatcttcgtaacgtaatccaataaccgtttttattcgacggttggtcatccgtcccggattctcaacgctaatggatgaaaagacggaattaggcacgtacaacgggcggtggtcgaatgtgttaattcgcgtaattcgccagccgatttcggcgaccgtaccttcgatatttctgtcaggagaacgaatccagtctccgatactgaaggggcgatcgaaatagagcataataccggagaaaaaattgctcaggacatctttgcccgccataccaacagcgataccgccgataccgccaaaggtcagcagaccggacagactcatgccaaaatgttcgccatacagtaagacaatcgcgacaataatggttatttttatgacccgtgccagaatacgggtactggtgacatctctacctttattgacctgtgctttttcaaattggttaataatcaggaaaagttttatcgtcagaataagcgcaatgagcgaggtgcagataaaatcaatgaccccggaagagataaaacgcaaattataatcttcaatagcattattcaggatgctcccgatggttccaataataatcgcgtaaataaaaaactgtgccgcatggaacgtgaatcctttcttccactgtacgttacggctgagccaaaatctcacgaccagcaacgccataccgcaactgaaaagtatcgccagattaaatgcgtttttgagaaaaaattcagtgaacattattgttttccgctccttcctacgataacagctcagaatgacctgattaacaggtattttacccaggataaacgcgtagatcatcgataagtaaaaagaagaaatagtgctatcagctttaatctcagcggtttactttttatgtaaatacaatgtcacgttttatggagcagacatcgcgtgattgtcatggtattgttgctatcaggtaacaaagtcatctgtaaaggacaatactatgatcatgatgaagctgaaatcggcgaaggggaaaaaatttctgttatgcctgctggcagtgtttatcgttgcggcatcggtggtaacgcgcgcgactatcggcggtgtgattgagcagtatcatattccactgtccgagtggacaagctctatgtatgccattcagtcggcaatgattttcgtttacagtctggtgttcactattctgctggcgattcctttggggatctatttcctcggcggagatgagtaacagggatgaggtgttggccggatggcagcgccatccggcaggacgcaagagggattaatcgtcctcgtcgtccagttcaaccggtgtctgatactcatcaggcttaatgactaacaggtcgcagcgcagatggtcaatgacctgttcggccgtgttccccaaaaacgcggccgagagtccggtacgtccaacagtgccaagcacaacgatccccgcctggagatgttcagcaagatccgggataacttcttccggcaagcctttttctacatgcgtaactttttcatcgatgctgaatttctggcgcagcgctttcatcgccagtaaatgctggcctctgatggcgtcgttatacacgctgggatcaaattccggcagctcaatggcgatattgattggcgtaacggggtaggcgccgaccaggtgcacttcggtatgattaacctgctccgccaattgtaaggtctcttttaccagcttttcgttgagagcattgtgataaggctcttcgcttgccaggttcacggcgaccagggctttgccgccctctggccacggctgatccttgaccatccacacggggcttgggcatttacgcagcaaatgccagtcggtaggggtaaaaatgaccgcttccagtcgatcgtgctgatgcgccattttcaacaccagatcgtgactgccggcgataacctcctggatgatggcctcaaagggacgattgtgccagaccactttaatttcaatggggacaccggcttcaagataatatttcgcctgctcacgtatccaggctgtgcgttggcttattacgccctgacgcattgcggtgcgttcgtcaggagaaagcagggtggtcatctcatacgagaaatcgtaaataggcaggaaagctttaattttgccgccaatccgttgatgcaaataaactgctcgccgtaatgcgggttggtcgtcctgattgggatcgatgaccaccagcatattttgatacatagccatacagggtctccttacaactgtcatcgcagtttgtaactaaagagtaactcaaatatggtgaatgaaacagaggaagcgcttctgccagatcaataaatgagaaaaatttaacgatatggcagaagataacatcaatggtttagctgacgtttaagcgacgttgcgggtatgaccggcgagggccgccagcgcatcgctgttttcaatagtaatatacttacctttcaccgccagcatgccgcttttctggaaacgccccagcagacggctaatggtttcgaccgttaagcccagatagttgccgatatcgccacgggtcatcgtcaggcggaattcacgcggtgaaaaaccacgctgcgcaaagcggcgggacaggttgtaaataaacgcagccagacgttcttcggcgtttttcttcgacaataacagaatcatatcctgatcgcctttaatttcaccgctcatcagacgcatcatttgctgacgcaggttaggcattttgccggacaggtcatccagtgtctcaaagggtatttcacataccattgaggtttccagcgcctgtgcaaagctcggatgatgaccgctgccaatggcgtcaaaacccaccaggtcgcctgctaaatggaatccagtaatctgctcatcgccttgctcggtaatggtgtagctcttaatcgttccggagcggatagcatagagcgatttcaattcatcacctgctttaaacagagtttgccctttctgaatgggctttttgcgctcgatgatattatcaagctgatcaagctcatgctcgttaagtgtgaacgggatgcaaagctggctgatactgcaatcctggcaatggatagcacaaccgccagactgaatgcgccgtataattcgcttttccgggatcataggtctgctcaagccgtaattgatatttgtcaattttaacatctttttggtgagcgcgtaagtctgagctatcccggagaaggaataattcaagtataagtttgatgaatacttttatctatttgaaaatacgtaatttatttgttgttgctttacataaaagtgtgaccgataaggcacttttgcctgtatattcataataaaagatagccttcatggcgtaatagccactcttttcgctgcacgccaccggcgtatccggtcagagtgccgttacgcccaatgacgcgatggcagggaacaacaatactgatggggttagcgccattcgcagcaccgactgcgcgtgcggcgcccggtcgtcccaattgcgccgccagctgaccatagtgcatcacctgcccgcaggggatagcgcgcaacgcctgccatacttcccgttgaaaaggtgtgccccccgtggcggtttccagggtatcaattacggcgagattgcctgcaaaataatctgtaagcttatcgctgagtccaccggggttagttgcagaaacgcgttcatagccttcgtgacggtagtggatatttagcagttgttccatacgatcgcggtactgttcccactcaatggcccgcagtcgaaactgctcatcgcaaaccacccataacggacctaatggcgtggctatcttctcttcaagtaatctcagcatccgttctctcacatcgtcttaatctaacgtaagagacaagatatcatgccaggaatacccgcaaccatactccttaaaagatagtcagggataacacatttagcgccagtaatatcgtaggcggagaaaaagagagcctggcgaggcggttaattgcctgacattgtcgctgttattggaaataactgtaaaccgttgtcggtataacagggcacggttatgataacggcagtcgcaaaaacgctggaggatgaaccatgaaccttgacgataaagcgctgtttcttgacgccatggaggatgtccagccgctgaaacgccatactgatgtacactggcagccaacgcgtaatcttaaaacgccccagcgtatcgacacgcttcagcttgataatttcctgacgacgggctttctggatattctgccgctgaatgaaccgctggaatttcgtcgggaaggattgcagcagggtgtcatcgacaagttacgcagtgggaaataccctcagcaggccagcctcaatttgttacgccagccggtcgaaacgtgccgaaaaatgctatttcgttttatcctggaggcgcagaaagaggggttgcgtaatgtcctgatcattcatggtaaagggcgagaggcgaagtcgcatgccaatatcgtccgaagctatgtggcccgctggttgacagagtttgaggatgtacaggcttattgttcggcgctgccgcatcatggcggcggcggggcatgttatgtcgcgttacgtaaaacggtgcaggctaaacaggataactgggagcgccatgcgaagcgtagtcggtaaatcgttgccgctggcggacaggaccgccagcgcaagctcgcgcgaacccgattttatgcctgatataacgccttatccaaacgctcaggattctgcaagagaacgggcgataacgctgtccacagtaataacacggagaaacagtcattcgcttatttaagcgtctattaaaatatactggctttcgacttaactattaagcagaaaatggtgataagtacatcacttgtcaatatggatggatgaatatcctggcatagcgaatataggtgattttatctgttgcactaagggaaatggcgatggtctggtattgaatatggagaatgtcaaagaaacgaatggcaataggtatctgaaatgctataaaaataaaacctgtctcctatcctggttgtaggccgtcaaaaatgttgagaaatatcagcgtcagaacatgcattattctattcatggtatgtacgtttcttttggtggatactttacaaataacctttctgcacgatctccctattttaattacgtgtaatatcatttatctgatctcgacattactgctttggtggtatatgacctgctatctggtagtgccgattaataccgtgaagaaaagtattgaagaggtcgcagcaggaaacttgtctattcatatctccgaatttggcaataattgcgccgggcgactcatccccggaattaatagcctgtcggagaatatttccgcgctggtacgcgaaatcagatcctcttcgcaaacggcaatgaccctttccgaacaactggcggcgcgcagtatgtcgctatccgtaaagacggaacagcagtcggcctcgttaattcaaactgccgccagtatggatgaaatggcggcgagtaccaaaaacaatgcggataatacccgaatggcgagcatacaggcggattgtgcaacccaatgcgcccgtaaaggcggtgaattaatggtgcgggttacagaaaatatgcgttctattaccgactgtgcctcgcagatgacggagattatttcattgattgacggtatcgcattccagactaatattctggcgcttaacgcggcggtagaggctgcgcgggcgggcgatcatggaaaaggtttctccgtggtggccggggaagtgcgtaacctggcgcatcgtagcgccgaggcggcaaaaagtatcaaggcgctgatcgacgttacgcatgagaatgtgcggcagggggccgccatagtgcaggaggctgaaaaaaatatgcaggagattgttggcggctccgggcaattaaacgtgctgatgagtgaaatttccaccaccacgcgggagcaggaaaaaggcattaaccagataacactggcgttgagcgatctggaaagcgcaacccatagcaatgttttaatggttgaagcgttatctgcttcttcggatgttttaaaggcgcaggtgatcgagttacagactaaaaccgacaaatttcgtttaagccagccgggttacagtgaacatgcgctgtcgcgctctcatgtatcacctctttcgaccatcaccaggcgcggccaggcctgataatacatgtttggtaagcgcctgttgctaaggcgcttttttcgcacgttcccgtaattctttttgcgcaatgagaaaatgagagattgcttaacctttcccgaaagctagactaacggcatcagagttgtaacgtggaggcgctgtggaagccattaagggatcggatgtgaacgtgccggatgccgttttcgcatggctactggatggtcgtggtggagtaaaaccgctcgaagataatgatgtgatcgatagtcagcatccctgttggctacatcttaattatacccacccggacagcgcccgctggttggcttcaacgcctttactccccaataacgtgcgtgatgcgctggctggtgaaagctcgcgcccgcgcgtaagtcgtatgggggaagggacgctcattacgctgcgctgtattaatggcagtactgacgaacgcccggatcaattagtggcaatgcgtttatatatggacgagcgattcattgtgtctacccgtcagcgaaaggttctggcgctggacgatgtggtcagtgatttgcaggagggcaccgggcccgtagattgcggcagctggttagtagatgtgtgcgatgcgttaaccgatcacgccagtgaatttattgaagagctacacgataaaattatcgatctggaagataatcttctcgaccagcaaatcccaccacgcggtttcctcgcattgctacgtaaacagctaattgttatgcgccgctatatggcgccgcagcgcgacgtctatgcccggcttgcgagtgaacggctgccgtggatgagcgacgatcaccggcgcagaatgcaggatatcgccgacaggctgggaagggggttggatgaaattgacgcttgtatcgcgcgtactggcatcatggcggatgaaattgcccaggtgatgcaggagtctctggcgcgcagaacttataccatgtcgcttatggcgatggtttttctgcccagcaccttcttaacaggattatttggcgttaacctgggcggtattcctggcggcggatggcggttcggcttttctctgttttgtattctgttagttgtcctgatcggtggtgttactttatggttgcatcgcagtaaatggttgtaacaaaagcgcttttcagaccatttcgtatgaaaaaacgccgagaaatttgagcgaagtcaataaaccatctacctattcggggcaatatctctctcgcaggtgaatgcaacgtcaagcgatgggcgttgcgctccatattgtcttacttccttttttgaattactgcatagcacaattgattcgtacgacgccggcttagattagtcggcttttttttgcctgtagaatatcagcgtctaccctttaagagtctgaatgacattctggagggtaatatgagctgtcttttgaccttattatatctacactcgtccttgtcggacccgattcccactgaccctgttcccattcctgagccgcttccccgtcctcagccgatgcccgacccgccgccggacgaagaaccgattaaaatgtcgcatcaaacgcccggatctgcgaggatacgcgcctgctgactatgagtcgttaccgcgagagtaaattgtgaccgctttttcaaccctgaatgttttgcccgccgcccagctcaataaccttactgagctgggctatcttgagatgacgcctgttcaggccgcagcattacccgtcattctggcgggtaatgatgtgcgtgtgcaggccaggaccggtagcggcaaaacggcggcgtttggtcttgggctcttgcatcgaattgacgtcactctgttccagacacaggcattagtgctgtgcccgacgcgggagctggcggatcaggttgccggagagttacgtcgcctggcccgttttctgccaaataccaaaattctgaccttgtgtggcgggcaaccctttggcgcacagcgcgactcgcttcagcacgctccgcatatcattgtcgcgacgccggggcgcctgctggatcatttacaaaaagaaaccgtatcgctggatgcgctgcatattctggtaatggatgaagcagaccgaatgctggacatgggattcagtgacgccattgatgaggtgatccgctttgcgcctgcgacgcgccagacgttattgttttcagcaacctggcctgaggccatcgcggcgattagcggtcgtgtacagcagcagccaatacgtattgaaatcgatacggtagatgcgctaccggctatcgaacaacagttcttcgaaacgtctgcgcatgaaaaaatttcgctgctacaaacgttgcttagccagcatcagccagcgtcctgcgtggtattttgcaataccaaaaaagattgtcaggccgtttgtgatgcgcttaatgcggtaggacaaagcgcgttggcgctccacggcgatctggaacaacgcgaccgcgaccagacgttggtgcgttttgcaaacggtagcgcgcgcattctggttgccaccgacgttgccgcgcgaggattagacattaaatcgctcgaactggtggttaactatgaactggcctgggacccggaggtgcatgtccatcgtattggccgtacggcgcgcgcgggaagcagcggcctggcgatcagtttctgcgcgccggaagaggcgcagcgggcgaatattctttcagaaatgctgcaactcaagctgaactggctgaatgcgcccgcccggcagccgtcactccctctggccgcagagatggctaccctatgcattgacggcggcaaaaaagcgaaaatgcgtccgggagatattttgggcgcgctgaccggcgatattggattagacggggcggatattggcaaaattaacgtgcatccaatgcacgtttacgtcgccgtacgtcaagcagtagcgcaaaaagcctggaagcagttgcaaaacgggaagatcaaaggcaagtcatgccgggtacggctattaaaatgatcgatagcatggcgtctcagcggagtgctgagacgcctgcagattatttcacttcgataacatcaagccgcaacgcctctaaggcggtgtcatcttcttccggctgccagccagcgggctgcaagggaatctcttcacgatcgaacgctaaatcgccgccgtcgacgacctcggaaccgtgagtgattcctttgaaatcgaacaggttagtgtcacaaaggtgagacggcacgacattctgcatggcgctaaacatcgtctcgatccgtccaggatagcgcttatcccagtcgcgtagcatgtcggcaatcacctggcgttgcaggtttggttgcgaaccgcacagattacaaggaatgatagggaaggctttggcctcagcaaaacggacaatatctttctcgcggcagtaagccagcgggcggatcacgatatgtttgccgtcatcgctcatcagtttcggcggcatccctttcatttttccgccatagaacatattcagaaacagggtttgcagaatatcgtcgcgatggtggcccagggcgattttggtcgcgcccagttcagtcgccgtacgatacaggataccccgacgcaaacgcgagcacagcgagcaggtggtttttccttccggaatcttttctttcacaatgccgtaggtgttttcttcgacgattttatattctacgcccagctgctcaaggtaggctggcaggatatgttccggaaaacctggctgcttttgatcgaggttgacggcgaccagtgaaaaattgatcggggcgctttgctgcaaattacgtaaaatttccagcatcgtatagctatctttgccgccagaaaggcaaaccataatgcgatcgccttcttcaatcatattaaaatcggcaatcgcttcgccaacgttacggcgcaggcgcttttgcaacttgttgaggttgtattgttctttctttgtattcttttgaatttcttgcattatttcagttctctggtactaaatggggcaaattgggggcaaactttgcaactacgataaccgtgcattcaacatcgctacttgttcgtcgttcatgtcatcaatccacataccgtaaatttcatacaccatctgcgcagtttcatgccccatttggctggcgataaatgccgggttcgctcctgccgtcaacagccagcaggcaaaagtatgtcgcgtatggtacggattacggcggcgaataccagcacgttttactgccgcattccaccttgcccctaaactgcttaccgagtaataaggtttctgttttcctttactcatcctgggcatgaacctgttcagacttccgcaataccattaacaggttctggatatagctgttttcctgttccatttcgagaacggtaatatgcctgcgttgagcgcgggtggcgtgatgcaaatattttttgtctgtggcagcgtaagtaaaaatgtgcaacacgcgctgggggaacggcagggtggcgacggaaacttcgcagtcctgacattcgtcgttgtcactggtgtctgtcccgctttcttcggtgccagcgtcgtcggcgcattcctccgttttttcgtcgtgggcgtcagtagcgggcgtgccggggatgagcataaatgttttgccatcttcgccgcccagctcatatttctgacagaaggtggtatcaaaacttccctccggcggaagttcgttaacagcgggggaattaacgcgaaccggttttgcaaaatctgtcggttcgaatccggcgtcaagcattgatacggcaaggcgtgctgtggcagcggcttcgctgctttcagttttccaccagaaagcaaaagggaagccgagacgtttccgggcgctttcatttttaaccttaatataatatgagtattctgttttattgtcgctcattatcattacccttattacaaatcatacttaatgaagactttcatttttcattgagcagaatgcgttcgtgacgagctctttacactccatcagtttcaacaatgaaataaaattttcgggaggagcttcgttcatttttaacagcattattgcggctgttattgacctgtcatatgcgcctgtttcactgtctgtatatgcaacaagagttctggaaacactttcatcgtcacagtcccgggcataagaaacaacacagggcatattgttttcgatacataacgtacgaatttttcctgaaagctggcggagctctgcaattactgattcaggtacatttttcatatagattccttttttcaggttgagtgaattcctgccattgcaggcatatttaaaaacaggatggtttaaacgattactgttctgttaccatgattcagctttggcaggcagaccatttctgttcagccagacttttaccatgcaatcggtaatacatctttgcgttgttaaatcacggatatataaacggcgttttttaatgttattcgctgaggcgatataagtacgaccatcatggataacataatctcccggcgtaatacactgacgcggtatttcatccgttccgaagtgatgagcaatcatagcccctccatttctggtaaataaattttgtggtgcggtgcctggtgcctccaggtgacattaaccagttaacaattaatgccgacttaaaccacccatactgattcagggagttttaactgtgccgcgtgcgcttagccgcattcaccgcatcacaaaattcactttaaaaagggcggacatcagaaaggactaagaaaaactgatgccgccaagtactacacacagcattattgtcgcagtggcaactacaaccggaggcgcacttccactatttggatttacagacaagaccgactcagaaaacatcagaaatgcgccttcgtgttgtgcccggctttatttaaccacctccgggcttcggtggtctcggctatacccctacagcgagaacctgtgttaacatttcaatacccttacagttgagagttattgatatgtcagaaaccgctctggttatcgtaaaattcctaattggtaaatccgtcggacaatttatgctcacagtggctttatttttcttaattatcatcttcattcctagagatattacggagcttattgaggcgcgtagcgatttaccatatgccgttcagatttttagttttgctgtggcttaccttatagtgctgatcctcaaagtcactggttattttttcgtgtcggcgctgccgttgtgccagcgtaggggcagggcaaaacgcatgttaaaaacgcttaattcattgagtactgaacagctgtttttacttgaaccctttcttaaaactcattctcccactttccgggcgtcctgggataaccctgatgcagatgctctggttaaggcaggtatcgttcgtccggctggttcgtgtatcgacggtgtttctgtgatgttcaaaatcgaacccgagtatgagtcgttaatgctttccacctggaatccctgcacaaaacggttcgatattagccgttagctgaaagcgccagcagaaactcactgaaactgagtgcttcttctccttcgtcaaggctttcaaagtattcttcgtaagccttttccatgattgtgtcgaaatccatatcactcacctgagtttctttctaaccagcgacgtgcgcctgtttcagttttaaacgtcctgcttctggtgtacgtcatggcggtgaacgttccatcctggttggggaacacgccacacaccagggattcgttattgccgaggtggattttttgcagcttgtccattatcaccccggataatactgttcctgtagctcgcattgagccaaaaacatatcccatccattgtcgcgcaatgcttggagagctgcgctaaagctgacgttgcaactatccatcaaatactgaatcacttcattccttcccatctttccctctccccttaacgccgggtggcggaactaaaacctacagcgccgtgctgtttctgagattatattagcgatattcatatagttgatcaagataaatatacatatatatcataaatatgatctatcctaatgaaaataaatgtgttttatctgatgcaagagggggagggaggagctttagccaaaagaaaaccgccgggagaggcggtttgatgtggttggttcgtcactgattttttaggcgcttttgtgcagcgagcatgttctggaaagcctctttatatagctcattctgacctttaagccggtcaatgagtttttctttctcagattcagggagtatatcaaaaaggtttagtaaatcagcctgttgtctgctcaccattcgccagccaccaccttcgaagttgtcatcgtaagtaccagaagaacgaacgtagttcattagatcggccaaatccggtcgtaactcttcgggtttaactctcaatagaacagaaaattttaaggccgcatcagtgttgagaggtgccttaccgttcaaatagtgactgacggtagattgtgtctcaaagcccataagatcagcggcgatctcctgagtaagtttgaggtctcgctttttggcgtcccagatggcgcgtaagcgctgggtagcttctggtggagctatttcttcacgtttttttctcatgcgctcatcttatgaatgtgactcataaactcaaactgatataagtattgatcatttaaattagtatggttaatatttagcgagaattactaaggtgacctttatgacgttagatgaatatttgaaaaaaaatcgtgtacgacagtcttgtttggccacgctggctggttgttcgcaatcgatgattagccttgttactactggccgtagtcagttaagccccgaaaaggtattgcgtatcgcagaggctacgaatttcgaggttacacctcatgaactccggcctgataacacttacggagctgaggaggatgacggggttaaccatttattcgacccgccactacctggacaaggcagaacgttgtggggatgtgtaccaggcgggcagaagaggggggattttcccgtcagaagaggcttatcgtgcctggaagaaacaggcgaaagtggacgctgacctgatttggaagctgcctgacggtgaggtacgtcgttacgacaggcaccacaacgtaatttgtcgtgagtgtcgtaaaagcgagtacatgcagcgggtactggcgttttatcggggaaactttcaggaggtgctgttgtgagccaaattaacaatcggaactgcgtgaagtgaaagagaaagcataatccaaatatgaataattaaatttagtgatgtaaataaactttaatccttaaccggatggattcctgcacgctcagaacaccaggagaccgcccgaaagggcggtagctccattgcttaattgtctaaaatcgtgctaaatctttttattaccattaagaaagttatgacagtgataaaaaaggatgtataggctaaaaagctaacgatatatgcgggtgcgcgaaaataccatttcattaaatccactgcattgtcaggcaggaaatatattattactgaaaatataaccaatactattgaagttaatattgcataagcgacgttgtggcataactgctcatatatggttttgttagtgtttaatgatatcaatttgtctcttgatttgtttccttcaattatatctgatatcttagtaatggttttttgtttttgttcataaatcattattactgcactcattaatagtgctgttgtaatagccccgaagttaacgaagacggaagcaattgccggtttcattattccgtatgtccagcacagaacgaaagaaagagatagaggaactataaaatgtacggtaatgtcgctcatcaacattgttccacgctgatctgacattgttttgtagtgttttattattacacccagcacatttattttattcatataatcacccctttatttccacagtgcagttcttccaatatatcattggaaaggttttttatcgtgtcatgaagtgctgttagatcaggtatacctgttaatgggttgatttttagatcattatcatctaactctgctgaaattcctttttttagtatggtatcataattgaaaacgacagtccgactgccgagctgtaagcttacttttattgcatcacatttatcttcaataatctcaatgatgtttcctatattcttgtttcttaaatccctgaaacttccgaatatgccatcgtttgcttttattattaagtctgtcttgatgtttgttttgtttttaccaaaggaatcagcaatatcttctggtgctttatatccttgagctttaatttgtttcaattcagaattgagaatgtattgagggattttcttatgatgtaatggattgattcttgcttctagttgaaattgtttttttagatattcagtgatagaatcagaaagaacacctcgagcagaaatattatcgcatgaatggaatgcaataattccttcttcaagattatctggtagatatattaaaatataacgctctttgagtgttacatcataagcagttgttctgtaatggacttttttgagttttacatcttttatttcactgctttctccatattttccaacttttatataaccatatatgattttttttgtgttatcaaagtgaagtttagtatgttgttccagagatattttagtttttgaaacgccgaactcgatgggggtgtttttataaagagtaaaataatcaacaaaaagttcatatgccgtttttttattacttaaacctaagtcattaagttttttgctggctcgactgcctttatgggtcaatacgcggaatgaatagaaattaacgctgtgcatgaaaaatccttttgagtatacaggaatatactagaacataaatgtatgcaatgcataaaggaaaagctaccgcagggcgaattcacccaccgatagctcttaaatgattgttttcaagcgataatacataaattttggtctgtgtaaagagggatgtatcgtcagggcaagggagatgtattaaggggtattggtaaaatttgcgttggggataaaaacggtttgcgggaaaaggagagttaagtagaattgttgcgggtgcttgaggctatctgcctcaggcatgaacaccaaaaggcagatagagaaaagccccagttaacattacgcgtccggcaagacgcttaacattaatctgaggccaatttcatgctttgcacatgtaggttagcctcttacgtgccgaaaggcaaggagaagcaggctatgaagcagcaaaaggcgatgttaatcgccctgatcgtcatctgtttaaccgtcatagtgacggcactggtaacgaggaaagacctctgcgaggtacgaatccgaaccggccagacggaggtcgctgtcttcacagcttacgaacctgaggagtaagagacctggcggggagaaatccccgccacctctgacgtgtcaggcatcctcaacgcacccacacttaacccgcttcggcgggttttttgttacccgtaaaataaaaattcataaaaatgatcaactttcagattggttgcgcaacaagtgaaaaatgtccttgctggtgaacataaaataagcaaatttatataatgaaataaatagtcgcagtgtttatatttcccgcctcaacagaaatcgcgttgaaatcgcaccttttcatttttccttagttgtctggaggtaacgtgaaaaaactcaaggatttattagagttagatgaagacgggctttatgcagtacgtgtaaaaaatggtgaaatctcattctgtacgctaattcctgacgaccatctgattctgtctgttgaagcgtttattgattatctgataagactgggtttcactgtcagttattaatgttttaatatgttacggctgacctgaacaatcagcaacctacagcgccaccggagagaacgatggcgcatctacaacttgttaaacaaacctcatcagggcttctgctcccggcaacgccggagagtgaggacttcctgcgctcagtaaaaatcggtgcgtggatacacgccgattttaagcgagtacgtaactacgcgttccacaaacgttttttcaagctccttcagcttggtttcgattactggactccgatcggcggggcgatcctgcctcaggaacaggagctgattaccggctttgtcgatttcctgtgtgagtcagcagcgcagggccacagtcccgcactcagtgacgcggcggaacagtacctgcataaggttgctgtcaaccgaacgctcgatgttgcgctgctcaagtccttcgacgctttccgcgagtgggtaaccattcaggccgggttttatactgagcattattatccggatggcagccgtgggcgccgggcgaaatccatcgcttttgcgaatatggacgaaaccgagtttcagcaggtttataaggccgtactgaacgtcctgtggaactggattctgtttcgtaaattctcctctccggaagaggtcgaaaatgtcgcagcgcaactgctggagtttgcgtaatggcggatttacgtaaagcggcgcggggcctgatgtgtacggtaagaattcccggccattgcaaccataatcctgaaacgtccgtactggcacattaccggctggcgggtacgtgcggaacggcgacaaaaccaaacgatatgcaggcagcaattgcctgtagctcgtgccacgatattgtcgatgggcgggtaaaaatcgacgacttcacgaaaacagaaattcgcctgatgcacgcagagggcgttttccgcacgcaggaaatctggagagagaaaggcattttatgatttacccaacaaacaccggaaaaagcggagaacaccttcgtctcagcacgctggaaagtgtgtggattcaggggaaattgcgtatgtgggggcgctggtcatacattggtggcggcaaaacagggaatatgtttaaccagttgctggcgtccaaaaaactgacgaagacggccattaacgatgctttgcgccgtatgaaaaaagcggggctggagaaacctgaactggaagtgttcctgagagagatgatcaacggaaagcaaaaaagctggctggcacactgtacggatacggaagcgctgattatcgatcgggttgtaggcgaggtactgacggatcatccggggctgcttggtatcctgaaccagcgttacgtggggcgggggatgagtaagagaaggatggccgagttactaaacgaacagtacccagagtgggcgttgattacatgccgacgccgtgttgagcagtggttgagtatcgctgagttcattttgtattcacctatgagaaaagcgttcgattatgcttaaaaaatcatttgcaaaatgagccacaaactgcttcaattccagtacgcttcgcaaagctgtatcgcgaggctaatgacagacatgaacgcattttgaaacccgccatcgtgcgggttttgtcgtttctgcaatacagaaaaatattcgccagtgtaatccgggttgttaaacatggtgcgttttaaatatgttttatgtacattaaattaatgtgaaatgttttgataaaataaaaatgtaataataactttacgtttattgacacaatgaattgttgaaacgcctgttctgactcgtattattttcatcggtccgaaggggatgatggataaccttcttctgcccccgaggatcagagagccggtttttttgtgcatcctggaaaattcacgtgaaggaaccggctctcaaccagagaagaagaggcgtttttttcgatacaactatcgtaattactccgttggtggtgctggcacgtaaagtgtggatagtgcgtttatgatgagtgcatgatgtatatcctgatacagcatccggtttgtgggggcggagaagccccgatggactcagtgccacaattttttattgcattcagatagcgtactgtgaatcggataaatgagaatgtcagtgtgttggtaatgcggggttctcagtgcgctatctgaatgcagtgaaatctgctctgagcagagctaaacagcattgtctgcgtttgatcaatttgtagcgggtcatagtggctgactaaagactctccggggcatcccggcactgcatttattactaaaaatcttcatatcacagaggcagaacatacggaaaattcttgtcaatacaacacctgacacagcaatatttttcgggagtccccggcgcctcaggttttttatcgccatcaataaaactataataataactccatgttatgattaccacctctctctcatgaggtggtttttttattcccgcaaattgcagaaataagatggagtcatcagaatatgccctgattgtattttgtcttttttgaattaatgcaaaacatttggaataaataaacatctaatgataaatttacatttcttgacgcgactgcttgttgaaatgaaatttttatgatttattattgtcgacagtttggcggaggtgactggcagatttctccactccgtcgaataagagagttgattctttatacctcctgagtcgtctgattaaagaatcatcactcgatttggcattaaggtgaaattaagattccattgatataggtatcgttcttactctttgtggtgcaggcatatggatatggggtggttacattaatgttcctttaatttaacctcctgatagtgaatcaggcaccgcaatttttttactgcattcagatggcgtactgcaaaaaaacggtcattgcttgcgccactgtctgatgctcttgtaacacatacgggatttgtggtacgccatctgaatgcagtgaaacccacataaagtggggcataaacaggatatgaggtgcgtttattttcgtctgcgggtcatggtgactgaccaacggccctccggagataattccggcactgcattatttattgaggtgttccccagtgcgggggtgaccgggaaaaatgttctgccgatggtcacagacacataccgggctaatatgtgttttcgggaggcacccgacacctctactgtttttccagtcgataactataaaacatgcttcagatattgagcaccgcctcccgtgaggcggttttttttattccgggaaaaagttctgcccgccatataataaagttaacgttttcagaccagggtgcgggaagtatccggggcgggaaataatgaattaaaaaagaagcgcggctgtcggatttaagccgcgggacaatgtccgtgatagatagttgaaaaatttcaggctatccctttcgggaggtcgccattattttactcataacaaaataagaccggaaccccggaaacaaccttattttccggtaaggcttatttcattccccgcgccacgcccggcgcacattcataactaaccacggagcctttcaggggtgagcttacgggatggtcagtgtgactttctctgtgggctggtcacccccgggcgcaggctcacccactaaaaggaaaagtcacgatgttaggtattttcagaaagaaaacccgcaaggctattgttgaagtgaagaagatggagaaccgggatgcggtggaggcgaccgtctggggcgcatattccattgcatacgccgatggcacctgtgacgcgaaagaaattgcagtgctggagaaaaccatcgcggcacttcctgcctttgcgccgttctccggcgagattgcccagatgagtgccaatatccgcgcccgctatgaggcgtcaccgcgtagcgcgaatgctcaggcactgcgtgagctggctgacgtggcaggaacagcagaagcggttgatgtgctgtgcctgtactggcctcgttcctgtcccgccttgctgactacaacggtaaaccgctggatgcgctgtgtgcagtggtgatgtcggtgctgtcagtgaaatttctgaccttcattcatgaccaggacatttcatcgctgaccggggttttttcacggatgcggggaggagggagtggtcatggaaagtaatctgaccggcacactgaatgcgggcctgtgcctggtgacagtgctggccctttttctctaccgccggaacggcgccagatacaaaccgggaatagcctggctgtcgtacctgctgatgctgggctatgcgctggttccgttccgttttctggccggacattacccgtcttcatcctggcctgtggtgctgatgaacgcgctgttctgcgggctggtgctgtgggcgcggggtaatgtgtcgaaaatactttcactgctgaggctgcgatgaaaccgaaggacgaaatttttgatgaaattctgggtaaggaaggcggctacgtcaaccatccggacgataaaggcgggccgacaaaatggggtattacggaaaaagttgcccgcgcccacggataccgtggtgatatgcgcaatttaacccgtggacaggcgctggaaattctggagaccgactactggtacggtccccgctttgaccgggtggcgaaggcctcgccggatgttgctgccgaactgtgtgacacgggcgtgaacatggggccgtcggtggcagcgaaaatgttgcagcgctggctgaacgtgttcaaccagggcgggaggctgtatccggatatggatacggacgggcgcatcgggccgcgaacccttaacgcgttacgtgtttatctggaaaagcgcggtaaggatggcgagcgtgtactgctggtggcgctgaactgcacgcagggggagcgctatctggagctggcggaaaagcgggaggctgacgagtcgtttgtctatggctggatgaaagagcgcgtattgatatgaaccgaaaacactggacacacagaatgccgcgaatggcggcgaaatgggcactggtagcgatactggtgccttttttactggtggggtgcgccagcctggataaggcgcgccagatattcgaagctgccgggcagagtcgtagtgaacgtcttttgggcctgaaaagtaaatccccagttgttgctgacaactggggatttttataacagcatataaatcgtaaaggaaattgtcatatgccatattcaagaacgtgctgaggttgagaagttttggaattttttcggtggcaaaaatggggcaaaatgctgtaaaaggggcaaaaatggggcaacaaaagagtggattatcgtagcttattgttgttgctgataatgcttaacgcattgaaaaataaataaaactattatgcatcagatggttgtgatttttgcccttacttgttgaggttgtattgctctttctttgtattcttttgaatttcttgcattatttcagttctctggtactaaatggggcaaattgggggcaaactttgcaattacgataaccgcgcattcaacatcgctacttgttcgtcgttcatgtcatcaatccacataccgtaaatttcatacaccatctgcgcagtttcatgccccatttggctggcgataaatgccgggttcgctcctgccgtcaacagccagcaggcaaaagcatgtcgcgtatggtacggattacggcgacgaatgccagcacgtttttatggcaagatacgcaatggttcaaaagcgtctttattctgtcatccgtattacttaagatatcatcacgccccgaaaaatattggaacgaagagatgtatgactaaagaagctgtaatctttctatttatcgccatcgtggtagaagttatcgccacgatctcattaaaattatcagatagttttacgcgtctggtaccgagcctcgttactatcatcggatattgtattgcgttctggtgtcttaccatcccaatgcgaaccatccctgcgggtatcatttatgctatttggtctggggtagggattgttcttattggattgataggatggttatttctcggccaaaaactggatatgccggctattattggcatgttgcttatcatctgcggcgtaatcgtaatcaatctgttttcaaaaagtgtcagtcactaggcgatgatgattgatttgagcccgcactctcttatgcgggctcgggtatttagcgtaccaccagtacggagcattccgcatgacgcacaacggctgcggcgttggaacccaacagataggtagtaatatccgggcgatgcgaggcgataatcaccatatcggccggtaatttttttgccatttccagaatcttatctttaggagagccttctgcaacgtgagcctgcacgcggtccgcaggaaggttgaatttcttgataatcgcttccagttgagatttggcttcggctttcaaatcgtccattgcgggaagctctgctgaataagccagtcccagtgaagcgtaatagggcaaagacgggattacagtcaaaaagtgcactttagcgtcgtcaatctttgcttcagcttcaacatgcgaaattacgcgttgagttaattctgaatctgaaatatcgatgggtacaagaatcgttctgttcataaaacctcctgtttaagtatccactgaaattctactccctaaaggcactttatgtacaatgacatacgtcacattttaggtgctgctccacgatactctgcggggactgcctacaggggagggcgacgtaatattacgcgtattccacgtaaataatcagcgagttgacgttaaaacgttatttctgccttgtcaggaaagacctaaaaagagatgttaccgtttaattcaataattaatgaaataattcgcagtgaaatagatataatttatacgaatgcttttgggggtattatacgaaataaaaattatacaatatcattcggttacgatattctacgcctgttatatgcctttattgtcacatattcattttgtcgctgggccattgcgttaacctttgctttccagcgtataaattgacaagcccgaacggatgttcgggctttttttgtttccaggttaatccttagaatattttttaatctgcgccgggtttttccgcttttcctgccagcaaggcaagaaagtcatagcgtttttgcaaatccaatgcggcatctcgccataattgttcagctacttcaggctgttgcgcattcaggcgacggaaacgctgttcattaagcaacgtttccgccagggcatcagacggtggccgagagtccagagccagcggcggcttgccttcatccgcacggcggggatcaaagcggtataacggccagaaaccggtcgccgttaactggcgcatctggtcatggcttagcgccagatcgtaaccatgttcctcacaggggctataggcaatgatcagcgacggtcctggccaggcttcggcctcctggatggctttcaccgtctggtttaactgcgcgcccagcgaaatttgcgcgacataaacatgaccatacatcatcatgctgacgccaagatctttacgggctttacgcttgccatgttcgccaaacttagtgacggcgccaagcggcgtcgccttcgacgcctggccgccagtattggaataacactgcgtatccagaaccagaatattgacattctccgtcaggcttaacacatggtctaaaccgccaaagccgatgtcgtatgcccaaccatcgccgccaatcagccagattgatttttctaccagcgcatcagcatcctttaacagttcctctgcgcccgcaaccgatttcagatgttggcgtaatgcggcgacctgttcacgccgaacgtcaggcgttgcttcggcatgcagcgcatcgtttaattccgccggaatgcgatcggcgaattgcgccagtaaacgcatgacgcgcgcccggtgctgatccacactcagacggaaaccgaggccaaattccgcgttatcttcaaatagcgaattcgcccacgccgggccgcgtccgttggcatcggtggtataaggcgtagagggtaagttaccgccgtaaatagaggaacaccccgtggcgttagcgattaacattctgtcgccatataactgagtcagcagtttaatatacggcgtttcaccgcagccggaacaggcgccggaatattcaaacagcggcgtaataagctgcgatgtgcggatatcaattcgttccagtttgctgcgatcgatttccggtaagtcgaggaaaaagtcataattcactttctcttcttccacatgctccaggcgcgacatcatgttaatagccttgatctgtggattttgccgatctttagccgggcagacctctacgcataaattacagccagtacagtcttccggcgcgacctgcagcacatatttctggccgcgcatatcgcgggacttcacgtccagcgaatgcagactggctggcgcgttctccatcgcctgcggggaaacgacttttgcacgaatcgccgagtgagggcaggcggcgacgcagtgattacattgtgtacacagttcctctttccagacaggaatctcttcggcgatattgcgtttttcccagcgggtggtgcccattggccatgttccgtccggcggcagggcggaaacaggcagtgcgtcgccgaggcccgccaacatggcggcggtaacggttttcacgaaatccggcgcggcgtcggagacgaccggcgggcgatgcgcgctatgcggattaaccgcctgcaacggcacttccgccagcgattcctgcgccagagccaatgcctgccagttacgctcaaccagatcctgtcctttgctgctatagcttttggcaatcgcgccctgcagctcaaccagggcgctatcgcccggaagaatatgcgtcaggtggaagaaagccatttgcatgacggtattgatgcgggcgccaagtccacattcgcgggcgattttcgccgcgttaaccacgtaaaaacgcgcctttttctgattcaacaccgcctgaacttcttgcggcagacgcgaccagacctcgtcggcgctgtacggcgtattaagcagaaagataccgccgggcttcagacgctccgccatctgatatttatcgataaactgtaattgatggcagccgacaaaatccgcctgagcaattaagtaagcggaacgaatgggtttttcgctgacgcgcaggtgcgataccgtgagcccgccagcttttttagagtcataaacgaaataaccttgcgcataccacggcgtagaattaccgataattttaatattatttttcgtggcggatacgctgccgtcgcttcccagaccgtaaaataacgcttcaagtttagcgctgccgggcagggtattttccggtaatggcagcgagaggttagtaacgtcatcataaatgcccaccgtaaaccgtggcttgggtttcgcacggctgagttcattaaagaccgccagtacgcacgccgggccgaactctttggatgatagcccataacggccgccaatggtgcgcggcaacgtttcgcgctcgccattattaaaggcctccgccagtgcggtcatcacgtccagataaagcggctcggcctgggcgccaggctctttggtgcgatccagcacggcgatagcgcgaacggtttccggtaatgcctgtaacaaatgtttggcggagaaggggcggaacagacggactttcagaacgccgaccttttctccgcgtatcagtagctcgtccacgacctcttcgcaggtgccgagggcggagcccatcattatgatgacgcgttcagcctggggatggccataatattcaaatggctggtactgacggcccgtagcgtcgccaaatgccttcatcgcctcttcaacatgatcataaacggcgttgtaccacgggttggtcgcttcgcgagactggaagtaggtgtccggattcgctgaagttccacgaatcaccggatgttccggattcagcgcgcgggcgcggtgagcgtcgatctccgcctgcggcatcaggttcagaatggtttcattcgttagcggtataattttgttgatttcatgcgatgtacggaagccatcaaaaaaatgaataaacggaacgcggcttttcagcgtagccctgtgtgcgatcagcgcaaaatcctgcgcttcctgaacgctggcggcgcataacatcgcgcagcctgtctggcggaccgccatcacatcggaatggtcgccaaaaatagaaagcgcgtgtgtggcgacagtgcgcgcggcaacgtgcagtacaaacggcgtgagctgccccgccagtttatacagcgttggaatcatcagcagcagcccctgcgatgatgtaaatgacgtagaaagcgaaccggtttgtaacgcaccgtgaacggcggcgatcgcgccgccttccgactgcatctctaccacacgcggcgtatcgccccagacatttttaagcccattgccggcccaggcatccgcttgttcagccattgttgaactgggcgtaatcgggtaaatggcgataacctcgctggtacggaacgccaccgacgctactgcgccattaccgtcaattgtttgcatatgacacccttacattgcgcaaaaaagagggacacgcataatcgtgagcgcatcctgtagttatccttttattttagcaaagcccttcaagccccattttcgcttttgtgtccctggcgggaggagaatggcgatttcttgccgaaaagacgtaaaaaattgccaataaatgttaatgaagcgcataaatgcgcgctttgcctctcgacgcgtcagtttctgctgcctattatttagggcggtgtcgtttggatgaataaacagaggggagagaaatgcgcgcagcgttttgggtgggatgtgccgcgttattattgtcggcttgcagtagcgaacctgttcagcaggcaaccgcggcacatgtttcgccagggatgaaagcggcgatgtccagcgccggcgaagcgaattgcgctatgattggcggttcgctttcagcggcccggcagcttgatggttcagtaattggtatgtgcgcgctacccaacggcaaacgttgtagcgaacagtcgcttgccgccggaagctgcgggagttattaagcgcggcgtttcgcctgacgcgtataacttttcacttaatggcttagtgcgctaaatccgccagtttatacattagcgttgtttctgccgtcgccagcgttaattggttcgcggttaaatcgacctgtgcgcccttgctgaagagcttgctgagggtgccgtccagcgcgttaagctgtggatcggcgcacatcattcgggtcatcgctaaatttttcacttttaattcgccgtccgacagttttccttcgccggtgaattgattgcacattttgccggataccgtcatgtcctcgccaaagctgagctccgggccggtgaccgttttaccgtttacgctttccagaacaaagcggtggtgctccagttgctcgcgtttgacggacacttttccactgctcacacaccctgtcattatgatgctcagggcgaccagcgtgacgcttttcttcattgatattctctgtaatctgatagttaacactgactatagtaatgatatgaccggatagatcttcaggggttatccgaaaatgctcccctgagcgcaggggagcgacaggattagaacagcgcgttcgggcaggcttcgcccttctcaagctggcttaagttttgtaacgtggtttcagagatgctgatcagcgcttctgcggtcaggaatgcctggtgccccgtaaacagtacgttatggcaggccgacagacggcggaaaacatcatcctggataacatcgtttgacttatcttcaaagaacaggtcgcgttcgttttcatacacatccatccccagcgagccgattttctgattcttcagagcttcgatagccgcctgggaatcaatcagcgcgccacgactggtattaatgaccataacgccatttttcatttggtcgaatgccgcatggttcagtaaatggtagttttccggcgtgagcgggcagtgcagggaaatgacatccgattcggcaaacaacgtttgcagatccacatactcgacgccgagatcaagcgcggcggtgctgggatagggatcaaacgccagtaaacgcattccaaagcctttcaggatacgcagcgcggcgacgccgattttaccggtaccaatgacgccagcggtttttccgtgcatggtaaagccggtcagtccctcaagggaaaagttagcgtcgcgggtgcgttgataagcgcggtgaatacggcggttcaatgtcatcatcatgccaatcgcatgttcagcgacggcttccggagaataagccggtacgcgcaccacctgcaaaccgagctcttttgcggcatccaggtcgacattattaaatccggcgcaacgcagcgcgatgtatttcacgccgtgttttttcagctcttccagtaccggtcggctcccgtcgtcattcacgaagatacaaactgcttcacatccattggcggttttcgccgttttctcggttagcagaaaatcaaaaaactccagttcaaaaccgaacgcttcgttcacttgctgtagatatttcttgtcatactgtttggtactatagacggcgagtttcatatgaccttctccagtgatgtttgaatcacacaaatatgcttaaaattatcttacaaaaaatcaaaaataattgatagtcatacatataatgaataattttaggttatcattctccacaacgcctcaaatagccggagggcgcccctgcaacatgaactattaggctatgtacgggcaatcatgccaaaataaagagatagccgactgaatttttcgttaaatcaggaaattaatggcccatgaagggtaaatataaagccgcccttgcgctactgttactgctgattcttatccctctgacgctactgatgaccctcgggctgtgggttcccactctggcgggaatttggctacccgtcggtacccgtatcgctctggaacaaagtccacgcctgacacgtcatgggttagtgattcccgatcttcgctatctggtcaatgattgttcgttagcgcatattacccaggcggaactgacgcatcccagccgttggttgctgaatattaaaagccttaaactggatgccgcatgcctggcgaaactgcccgctacggaagcttctcccgccgcgccgcgtacgctggcgcagtggcagtcaatgctgcccaatacctggattaacatcgataatgtcattctcgcgccctggccggaatggcagggcaagctggcgatctccatgacgccggtcattcagcagatacgttatcagggcgaaaaagtaaaatttcaagggcagctacgcggtcaggcattgacggtgagccaactggagatcgccgcgctggccaaccagcctcccgttagcctggcgggggaatttgtgttgccgctggtaccggatggcctgccggtcagcggtcatgcggcagcgaccttgcgtctgccgcaggaaccgtcgctggtggatgcggaactggagtggcgtgataacgccggacagctcatcgtgatggcgcgaggtaatcctgacccgattctcgatctcccctgggcggtaacgcgtcagcggcttaccatcagcgatggccgctggaactggccatatcagggattccccttgagcggacgtctggcttttaatatcgataactggcaagccgggctggataatgcgcaagtcagcggacgcctgaatattctgacccagggcgatgccggtaaagcgaacgctgtactgactatcggcccgggaaaactcagcatggatagcagtgagatgcctctacagcttaccggcgaggctaaacagaaggatttaatcttttatgccgtattgcccgctatgttccgcggcagtctggccgatccgcagctcacctttgcacctggcgcattgctacgctcgcgcgggcgggtgattgatgcgttagatattgatgaaattcgttggccgctggcgggcgttaaggtgacgccgcgcggcgttgatggccgattacaggctattttacgggcgcacgaaaatgagatgggcgatttcgttcttcatcttgatggcctggccaatgattttctccctgatgctggtcgctggcggtggcgctattgggggcaaggaagctttacgccaatgcgcgcccactgggatattgccggacagggcgaatggcatgataacaccatcaggttgaccagtttgtccaccggttttgatcagttgcactatggcgcaatgactgtcacatcgccaagactggcgctgaataaacctattgtctgggttcgcgacgccacaacgccgtcgctacagggcgcgctgtctctggtggcggggaaaaccgtatttaccagtgggagcgtgctgccgccttctacccttaattttagcgttgaagggcgagagccaaccctgttccagtttaaaggcgaccttcgggcgggggcgatagggccggtacggctgaatgggcgctgggatggcgaacgccttcgtggacaggcctggtggccgaagcagtcgcttatcgttttccagccgttgcttccaccggactggaaaatgacgctgcgcgaaggctcactgtatgcgcaggtggctttttccgccgcacaggggcaggggtttgaagcaggtggacacggcgtgttaaaaggcggcagcgcctggatgccggataacaaaatcaacggcgtcgatttcattctgccatttcgcttccacaacggcgcgtggcaattggggacgcgcgggcccatctcgctgcgtatcgccgggatagttaaccaggtcacggcgaaaaatatcaccgctgatttacagggcggttatccctggagcgagtcgaatccattactgctaagcgatgtcagcgtagacgtgctgggcggtcaaatcattatgaaacagttgcgaatgccgcagcacgacccggcgcttttgcgggtgcaaaatatttcatccagcgaattgattagcgccataaatccaaagcaattcgccatgtctggtccggtcagcggcgcgctgccgctgtggctgaacaatgaaaaatggataatcaaagatggctggcttacgaatcctgggccaatgacgttgcgtatcgataaagatactgcggatgcggtggtgaaggataatgtcacggcaggctcggcgatcaactggctacgttatatggagattacgcattcgtggacgaaaattaacgttgataacctgggcgtactaacgatgcaggcggctattaccggcaaaagccgggtagatggtaaaaccgcgatcgttaacttgaactatacccatgaagaaaatgtgtttacgctgtggcgcagtttgcgttttggcgacaatttacaggcatggcttgaacaaaatacagtgttgccgcaacctccttgccggaaagacaaggactgtgaggataaataatgaaaatgagtattgccatgctgtcagcgcttgcgtcatttatcgtggtgggctgcacgccacgtattgaagtcgccgcgccggaacagccgattaccatcaacatgaatgtaaagatcgagcatgaaatacatatcaaagtcgataaagatgttgaagaactcctgaaatcacgcagcgatctattctgaggccataatgaaaaagtatttaatgctatgggtgctgacgctgagcttgctcacaccttctgtgtgggccttaaccctggacgaagcgcgcacgcagggccgggtcggggaaacgctgaatggctatctggtggccttaaagaatgatgccgaaacccagaaactggtgcttgatattaatcatgcccgccgcgccagttatcagcagttagcggatagcaatcatcttcccgtggacgaggtggcgaagatggcagggcaaaaactggttgagcgcgccaggccgggagaatatgtccagggaattaatggcaaatggatgcgtaaataaccgcttcccgacaatttttttaccgcaaaatgcatttttatattggtaatttttgaatacggaggtcgtatttacattaggcgaaccggaaggctatttctatactgtcgactggtatcactattcgcgagagtaaccaggtatgacgtctgaaaaattatctgctgcttgccattgtggcagcgtcgtgtttaccgttcaacttagcgatggctttcataccgccaggcgctgcaactgttcgttttgccggatgcgcggagcggtggcagtgtctgcgccgctatcgggtattaaagtgctaaaagggcaggataagcttaccgaatatcgcttcaatacgggcaaggcggtgcattttttctgttcggtatgcgggatatatacttttcatcagcgccgatccaatcccgatcaatatggggtcaatgtggcgtgcatcgaaaatgtgtcgccttttgatttcgcctgcgttgaagtcaatgatggggtaacgcatcccagcgatggcggcagtagcggcgtggtaggatatttgcgctacgaaccggagacgttgcctcccgtcgaaacgggaggcaaaaatatttaagcggccacgacgctgtcaatcgcggctttagcatcggcctgagctttagccgccacttccggcccgtaggcgatgccttcggcaaagacaaaattcacgtcggtgataccgataaaaccaaggaacactttcaggtaaggcgcaatcaaatccgtcggggtgtctttatggataccgccgcggctggagagaaccaccgcgcgtttaccggttaccagaccttccgggcctttttcggtatagcggaaagtgataccggcgcgggcaatcagatcaaagtagtttttcagctgcgtcgggatattgaaattgtacatcggcgccgcaataacgatgacgtcgtgggctttcagttcagcaatgagttcatcagacagcgccagagcgtcctgctgacgtggcgttaaaggcgcatcgcccggacgcatcgcgcccaccagctcgccatccagcaccggaacagggttggccgccagatcgcggacagtaatttcatctgcgacgtgtttttcgcgccattgttcaataaaatagtcagtcaactgaccagactgagagtaccctgccagaatactggatttaagaactaataccttgctcatgggtgtttccttttatgtgtttgaaggggcgtgccccgttgcttgttgacactttattcacaaatatgtcgcagggatagcgcaatatatcgaaccctttgttcgaaattattgaacaacacaaaaaaagccccaatgtggtactctatacctatcatttaaaacgattttaaacaggcagaatgctgcccaagagctttatgactgaacaatctacgttgacgcttcaggtgttacagcagcggctggatgcactgatgctgcgcgacaaacagcgctttgcgcgccgcctgcatggcgtaaagaaagtaaaaaatcctgatgcgcaacaggccattttccagacgatggcgaaagaaattgaacaggctgtggcgcaagtcgccctccgtgaagcggcgcgcccctcaatcacttatccgcaaaatctgcctgttagccagaagaaacaggacattctggaagcggtccgcgatcatcaggtagtgatcgtagcaggggaaaccggttccggtaaaaccacccagttgccgaaaatttgtatggaactgggacgtggaattaaaggacttattggtcatactcagccgcgtcgcctggcggcgcgcaccgtcgctaaccgcattgccgaagagttgcaaacggagccaggcggctgcatcggctataaagttcgtttcagcgatcatgtcagtagcaacaccatggtcaaactgatgacggacggtatcctgctggcggaaatccagcaggacagactattgatgcagtatgacaccatcattattgatgaagcgcatgaacgcagcctgaatattgacttcttgctcggctatctgaaagagcttctgccgcgtcgccccgatctgaaagtgattattacctctgcgaccatcgacccggaacgcttctcgcgccactttaataacgcgccgattatcgaagtctctggccgaacgtatcccgtagaagttcgttatcgccccatcgtggaagaggctgacgacactgaacgcgatcagctacaggcaattttcgacgctgttgatgaactggggcgtgaaagtcccggcgatatcctgatttttatgagcggagagcgggaaatccgcgataccgccgatgccctgaacaagctgaacttacggcataccgaagtgttgccgctgtatgcacgcttgtcgaacagcgaacagaaccgcgttttccagtcgcacagcggacgccgtatcgtgctggcgactaacgtggcggaaacctcgctgacggtgccgggtatcaagtatgtgatcgatcctggcactgcgcgcatcagccgctacagctaccgcactaaagtgcagcgcctgccgattgaaccgatctcacaggcttccgccaatcagcgtaaagggcgttgcggacgcgtatcggaagggatttgcattcgtctgtattcggaagatgactttttgtcacgtccggaatttaccgacccggaaattctacgtaccaacctggcgtcggttattttgcagatgaccgcactggggctgggtgacatcgccgccttcccgtttgttgaagcgccggataagcgcaatattcaggatggcgtgcgtttgttggaagagctgggggcgattaccgccgacgaacagcaaacggcatataagctgacgccgctgggccgacaattatcccagttgccggtcgacccgcgcctggcgcgtatggttctggaagcgcaaaagcatggctgtgtgcgcgaagcgatgatcattacttccgcactctctattcaggatccgcgcgagcgcccagtggataagcagcaggcttccgatgagaaacaccggcgctttcatgataaggaatccgattttctggcgtttgttaacctgtggaattacctcggcgagcaacaaaaggccctgtcgtcgaatcaattccgccgtctgtgtcgcaccgactatctgaactatttacgcgtgcgtgagtggcaggatatctatacccaactgcgtcaggtggtaaaagagctggggattccggtaaacagcgaacccgcagagtaccgggaaattcacgttgcgttgttaacggggctgttgtcgcatatcgggatgaaagatgccgataaacaagagtacaccggcgcgcgtaacgcccgattctctattttccccggatccggtttattcaaaaaaccgccgaaatggacaatggtcgcagaactggtggagaccagccgtttgtgggggcgcatcgctgcccgcattgagccagaatgggtggaaccggtagcccagcacctgattaaacgttcatatagcgaaccgcactgggagcgggcgcaaggcgcggtgatggcgacggaaaaggttactgtctacggtctgccgattgtcgccgcgcgcaaggtgaattacagccagattgacccggcgttgtgtcgtgagttgtttatccgccatgcgctggtggagggggactggcaaacccgtcatgccttcttccgtgagaatctgaaattgcgtgcggaagtcgaggaacttgagcacaaatctcgccgccgcgatatcctggtggatgacgataccctgtttgagttttatgaccagcgtattagccatgacgttatttccgcccgccactttgatagttggtggaaaaaaatcagccgcgagacgccggatctgctcaactttgaaaaaagtatgctgattaaagaaggcgcggaaaaaatcagcaaactggattacccgaatttctggcaccagggcaatctcaagctgcgtttgagctatcagtttgaaccgggcgcggatgctgacggcgtgaccgtccatattccgttgccgctacttaaccaggttgacgagagcggttttgaatggcagatcccggggctgcgccgtgaattagtgattgcgctgattaaatcgttgccaaaaccggtacgtcgcaactttgttccggcgccaaactatgctgaagcgtttttgggtcgcgtaacgccgctggagctgccgctgctggacgctctggagcgtgaactgcgccggatgaccggcgtcacggtcgaccgggaagactggcattgggatcaggtgcccgggcatctgaaaatcacgtttcgcgtggtgaatgacaaaaacaagaaactgcaggaagggcgttcgctcgccgagcttaaaaatgcgctgaaaggcaaagtgcaggagacgctctcggcggtggcggatgacggcatcgagcagagcgggctgcatatctggagtttcggcgagctgccggaaagctacgaacagaaacgcggtaattataaagtgaaggcgtggccagcgttagtggatgagcgtgacagcgtcgctatcaaattgtttgataatccgctggaacaacaacaggcgatgtggtgcggtttacgccgtctgctgttgctcaatattccttcaccgattaagtatctgcatgagaaattgccgaataaagccaagctggggctgtactttaacccgtacggcaaagtactggagttgattgatgactgtatcgcctgcggggtagataagctgatagatgccaacggcgggccggtttggagcgaagcaggtttcaccgcgctgcacgaaaaggttcgcgccgagctgaatgatactgtggtggatatcgcgaagcaggttgagcggatcctgacgaccgtattcaatatcaataagcgtctgaaagggcgggtggatatgagcatggcgttggggctttccgatatcaaggcgcagatgagcggtctggtataccgtggttttgtgactggcaacggctttaaacgtctcggcgatacgctgcgttatctgcaggcaattgaaaagcggctggagaaactggctgtcgatccgcaccgcgatcgggcgcaaatgctgaaagtcgaaagcgtccagcaggcgtggcaacaatggataaataaattgcctccagcgcgtcgcgaagatgatgatgttaaagagatccgttggatgattgaagaactgcgtgtcagttatttcgcccaacagctcggtacgccttatcctatttccgataagcgtattttacaggccatggatcagattacggcctaaaaagccaggcgacgacgtctttcaaagcgatccggtacaagttcggaacaaaaaggaggaattatgaatacaacgccatttccggcgctctctgcggaaacattgctggcggtgaataccgtcggacagtggctggcgcaaaatgatttttccggcgaacaaccttattcgtcggattgcgtcgtcctggcgggcaatgcggtgatccccactatcgacgcggcctgtcgcatcgccaaagcgcaaggcgttcctttactgattagcggcggtataggtcattcgacgccgtttttgtacgccgtgattgcccggcatccgcgctaccacactattcgcacaaccggacgcgctgaagccgcgatcctcgcggatatcgcgaaccagttctggcatattccggctgagaaaatttggctggaagatcggtcaactaattgcggcgaaaatgcccgtttctcttgcgcactgatccgtcaggcgaaagaaaacattaacacggctatcgttgtgcaagaccccaccatgcagcggcgcactatcgcggcattccggcgcgtgacaaacgacgacaccgatgcgccgcgctggctgagttttcctggttttgttccggtactgcgccaccttaacggcggtacacgttttgccaacgttgaagagggcatctggacggtggagcgttatctgtctctgattgccggcgagctgccacgtttgcgtgacgatgaaacagggtatggaccgcgcggtaaagattttatcattcacgttgatatcccacgcgatattgaaaacgcatggcaggtattgcaggcagatacgacgctgcgcagtgcgttagaacagagagcgttacgctaaaaatcgcccgtttgcgagggtgaacgggcaagtgcgaccaccatctcataaatttgatgaattatttataaaagctggttatgttgtcgctttacggttttcattcaggacgcgctatgggcaataagtattccggcctgcaaattggtattcactggttagtcttttttctggttattgtggcttacgccgcgatggaactgcgcggttttgcgccgagtagttatcggccctggtttaatatgacgcatgtttcatgtggtatcactattttgcttttaatggtggcgcgcttgattattcggctgaaatatcccacgccgcccattgttcctcgtccaaaaccgatgatgaccggaatggcgcatttaggacatctggtgatttacctgttatttatcgtgctgcctgttattggtctggtcatgatgtataaccgcggcaatccctgggtcgcatttggcattactatgccgcatgccgccgaagctaactttgaacgcgtagatatgctgaaatcctggcacgtcacgctggcgaatctgggctattttgttattggacttcatgccatcgctgctttgatgcatcactatttctggaaagacaatacgctgttacggatgatgccgcgtaagcgtaactgaccgtcctgtatgacgtttgctacaggcggggttaactgcttcaggcaaacaaggcatctatcagaggggatggcgtattccatacagaaaacgcctgcgtctaaccaggacccgtgacgcaggcgaaggaggacgggtctacatcggaagcgggtattatacttatttgtatgacaaataaaataaacaattactattccgtaatccaatgtttaatcaacgggttaaacccacatgatcgcgctgccgaccgcccggaagtgcctacacttacaatgaacgtggcatagtggcggaaaatagcgcaacggcgccatgttgctccaaagtcaccttagcgaaatgttcgtccaacacgctgcgtaacgtatcggctgaatcattggtattactgaatattcctttcttgttataaacagccattaatttcttaccaaaagcattgtgaggaacctctttgcccagaatcgtggcgccaaaaagtgtgccgccgggtttaagcgccataccggcatttttaattgccttcgcttttgttgtcatctcaccgggtaagcagtgcagaagatagtacatcgaaacggaatcgaagcgcccgtgccagtccgccgggaacgtgtcgaaaacatcgtgttgtagtgtggcgcggattttcgtattacccactcggctggcggctattttcaggctatccggatttaaatccatcagcgaaatggcatgagtcgcaggtgcatgtttcaggtaataacctgtacctacgccaatatccaggtgagtctcgcccatgtgatgcaggaagaaaggaagtagtcgcgtatcagtaggacacttccatgcatatttgtttgagatattgagtacccaccagtcatataagctaagcgtgaatgggttatagacttttgcgcctgattgttgtgtatgcttcattgttctctcactaaataatttcgcgctggaattaaaacaacgaagcaatcgttaggcaagcattaatcaggtgagtgagtaatttaatgcgatgaataaaggagatattatgaattaagcggctatcttaaagaatatagaggataataatagctgataaatgaattgaacagtcatattattataagctgataattaataatcgttgatgtacgcgtattaagccctttgataataacaatgcaattaaatgcaggaagaacaatatttattcaaacacataaagcgattattacacattaattgatattttaaatgttacgctgagatagccatctttatttaatatcacctacctggaggcgatatgattgaggtttttgaagcgtttggctggaccttacttttaggcggtctggcagtggcagtactgtttatcactgcactggataaaaaacggtaatcattgcatttgacgcgcctgttgagtcggtattacaaataactgtacctgaaatctaccacttctgaagtttgcgatattttgccattctgacggcaagggataatcctgactaaagttaccgccgcttaccaaccagacacgatggtaactttttgaaagcgttgtcagagtatcaatatatgtctgatcggcttgcgcataaaacagtgaaccaaatccataggcattcggtctgcctgatgttccatgagcgttaggcggtgtataaagaaacgtacgataatctcgcttattataatacacataacttaaataatcgaacattttactgactaccacggcatcattaggctggtgacgggtattaatatagtttaccagtggtttaaactcgtctatgtgctcagggttattatgatatgaaccatagccgaataataaggtgaataagataaaccagaagccacaaaccgctttttttgcgcgggtaagtaataccgcgagcaggggaggaatgctcagcgatgagaagaagaaataacgatcgataaataacggcatccaccaggaaatgatgaagaccagcattacagggatgaccagattacaaaataatatcagctgatatctttcatattctccgttgcataaagatattcgccccacagtaccgataaaacctcccacagccagccacagaatgaacgacggaaaaccctgtccgttgtttccggtaaaaaatgccaatacatcgcaggcaggtcacgccatgttacggggggaatccaaccgatatcattaccggctctcaactgcgccagatgagtcagtaaattaaacaatacgggcaaccaggggagataagcgacagcaatcgccaggttagcaaaccaccagccaggaagtttaaggtagcaggccgttttatggctttggcaggataatattgttactgcgatccagtgggcaataagtgtaaatagggtgaaataatgggtgtaaaagctgaacgtcataagtaaagcatacgcgataagatagcgattatgggtgggtgtttttatccacatcatcaatgctaacgcggcagcgagcgttagcattcccattaacgcgtacatgcgcgtttcttgactgtaatgaactgccatcggcatcagggcggcgaaccatcccgccaataaggctgtacgttcatttgccagccatcgcgtaagcgcgataaccagcacaactgtcaggatcccaaagagtagactgagagagcgtaccgctgcaatgctatcacccaataatatgatccagtcatgcagtaacagataataaagcgggggatgcacgtcaaaagcggtatggaatagcagattatctacgctatgtcgactaatcagcacgctggacgcttcgtcacaccaaaggtagcggtcagttaaaaacagcaaccgtataaggacggagaatatgacaatgagacaaacatgatatttatactttatttttcttaacccatcgccgggctgccatattgatagttgtggtagcgccataatatcctcaatggagtaagacttagaccagaatggacacctaacgcaataatgaaggttaaaatcttaaccaacactaaataaaaataactttgataatgtcagtggtgaattaatcagaatagtgcagtgcaactcagtaaccctgaccgtaatggcgaagcagtctatgctctaaaaaccgggtcaaaccgacgagaaaggtaacgccaataagatacactatggcggcaaaaaggtaagcatggaagaatttaaagctggttgcagcaacctcctgaattcgcgcgaaaaactcagtatattggataagaaaaacgatggtgctgtctttaaggttattaatcacctgattcgttaaggctggaatggaagacagcaatacctgaggcagtataatccacaaaaagacctgccgtttgttcaacccctgaacgactgctgcctccgtttcatacttattcaatgcgttataggccgttgtcatgtacgcggcattatatgcgccgacattcaaggtaaaacctgtaaccgccacggtaaaagaggacaggtgaatgccagattgaggtaaaccataatagataacaaatagaataagaatgagtggcgtaccgataaagaaatccatgtacagtcgagttatggcttttaccacggggcgatggctcaggctcagaaagaaaataataattccccacaaaaaaccggtgatggaaacaatcagcgcaagtttacaggtttctttaataccgtccacaacaagtggcagttgttcagtcaggtcattaaagaagagagaccagccagcgatcatcgttgtgcctcgctaaaaaaacagtggatatctggatccgtttctcgtaaggcaagatcggtaaaagcgccttctgcacgaatcttgccatgattaagaaacgttacgttatcgcttagtaatctggcgaggcgaatatcatgagtgacgcataatatagtgacgccattgtcgtgaagttgcttgatcaacattccgacttcacgagtcatgagcggatcaagcgcagacgtcggctcatcaaaaataatgagttctgggtcggtgaccattgtacgggccagggcgacgcgctgttgctggccgcccgataattgcgaagggtatttcgcgctatgcgaggccatatcaagtttttgtagctcatgtaaggctttctcccgggctagttgtcccggcatgccaaacactttacatagggcaagggtaatattatccatgacgttaagatggcgatacaaagcgtaattctggaagacacaaccaactttttttctgaactcaagaatagtaaattctttgtcgtaaatatttttcccgtgaaaataaatattgccataatcaggttcttctaatcgaagcagacagcgtaaaagcgtcgtttttccacaacctgatggccccatgactactttcatgtctcccgattgaattttcagactaaccgtatcaagaaccttttttcctgaatattccttacttatctcttttagtttcagtaaagccatgagtatcacctctatttttatggttcaactgatgcgatattttttctcaaacactccggccagaagagtaaaaactttataaataatgaaatataataccccgtcaagagtatagatctgtaacccgttcagcgtgatggctgtcagtgacattgcctgcttcgttatttcagcgatacctacagtataagcaaagggcgtcgcttttaatacagaagaaaactcattgataataccgggcacagaaaatcgcaacatctgtggcagttcaatatttattataacctgtaattgacgcattcctgctactttcgctaccgtaatttcgtatggctcaactaatttaagcgcccctctgaacacctcggcaagatagctcccactgattaagccgacgctgaggttcatggccaccagaggtgaaacatatatgccaatcgatggcaatccaaaataaacaagaaaaacagcaataagtattggaattccccgaagaataaagaccagtacgtcgagtatcttctgtagtggaaggggggatagtcgccgtaatacggcgactgtaagcccaaacaaaaacgctgagagaaaacaggtaaatgttacaagcagcgtattaccaatcccttccaataggaaataaaagatagccagcatattacctgatgacatagcttactatttcatccagctatcgacaatgccagatattttttgtggcccttgctctttaagccataagttgaaatcatcgcgcacgggagagcctttcttaaaggcaatgccaagctgatcaacattcttgaaaacataacggctttctatcggcatctttttcttatttttgaaggtaaaataaaccggctcttctataaaagccagatcaagattgccattttttagatcagccatcgtctcattataggttggatacaattttactttacttaacgagtagtatcctttgggctccagatcgtttttgataaggtcggagtaagccattcctcgagggtatccaatagaatattgatttaattcattgaggttattgagcgttattttatgattggccatactgaccagataaaaagagttgatgtaataaggttcagagaaatcaataactttcttacgtttatctgtgattgaaattcccgaaaatgctacatctgcctgaccactcgccactgcgccaagcattccatcccaggcatattcggtgatgtttagcttacaatgccgtgactgacagtaagacgaaaaaagctccagatctatcccctgcaatttgccatcagcacttttaaataacatagggggagaggctggtgatactgcgacattgagtgttctcccttcaacgatgctatcagcaaacgctgaagacgacattattcccaacactatcatcgataagccaaattttttggataacatgctatctatttcctgtagtaaggtaatgcgtattataaattaagcattagggcgtgagcctgacatttgcaggcgtaaagtacttaacgttatgtattccatcgctgttaagtaatttaatcaggaggtttgacaggaatcatcaaagggaatggattgaatataccataagatatcaactggatatgagtgcagcgacaccatgaaaggtgaaaatgtaaagataccatagacattagtatactggacatagtttatgctccatttacgcatacatatttacatgataagcagataaatgcttcagtgacggtgcctttcatgtctctaattatcatcttaccactctatccagggccaatataaagacttatcttttcttgtcaaatacattttttgagctaagttgatttgcgtgctatctatatttacaagcatataaattatttgtctcatgaacaaacgacaacaagtcaggatttttgacgatgttgttatgtttatcaaaacgttaacttgttttaatcgatgataatcttaattcagaaatatctgaatatatacggttgttgagataaaattctcaaattaacatcgtacatcttatgtaataaatataaatacgattaataaatccaaaactgagactgacaaccggataacaaacagcaataaagagggttcttcattaagttatcctggcaacgattaaggtgataacattttcggtggctttacccattttaatcgtgttcacagccgttaattaccttatgattaccatggtaattaaaaatgaatccttaatgactcgttggctgagtgaaaaaaaattctacatcacataggcgcatgtatcgcgtataatgggctccgatgcccctaattattgctatgacataatgatatgtatcttaaccgcttttgttatttactcctgatcttcgctgcggtcggaagcatttttacatcgcatcccgtcgcgatgtggttcctgctcgccaatgtgctaacgctggcgatctacggtatagacaaaacggcggcacgtaaaacctggcgcagagtgccggaatccactttgttggtgtttggggttgtcggtgggtggcctggggcgattgttggtcaacaactcttccgtcataaaacgcaaaagcagccattcaaaacatactttattgtcagtgtgatagtgagtattttagttacggtggcgatttatcgactctatccatttttgtcttactgaacatagactatgtatcacttattgaccaatcggcagcaaagatagcatcatattttcatgccaccggcactatgatattgagctgtgttttgctcaaggcgtaccgcagccgatggaactttattcagtggaataatgatgagctataaaactttctaacattatggcaaaacaatgatggacttcctgggttggatggacaaggtcgttgaagacgtattgcggacatatatctagctgagggtctttagccccgggaacatgtacatagccgtggtgagtataagggttttccgtatcataaccaatattactggccgcctccattatcaccttaaatgcatcggcagtctcgtaatagcatattttatgctgggggtatttttcttttaattcttcaacattagtttttaacagggcattgtgagcgatgctttcatccttaagctttcttttttcatcagaatgtttgccataaggtgttaaagacaaatcgggaatccccatgaccagaacattattaactccaccggaaattattttttcaatatcatcaatttgttgctcaacgaccattattacattatctttgtgtagtgtcatatagtcattagcccccaataaaaatatcgccaggtcctggtgagaaggggtgtaagatgcgacttgtctatccgtatttgatacaaagtcaccgatgcaattaaagcaggaatagcttgccgatgtacttcccccttcagcaaaattaagcatctctttacctaagaagtgtggagatgataaaaactcagtccaggtaaatccattagtaaaccttccgccaaagtattgaccataggagggtaagatatgatgtgttttttcaaacatacgccctaaggagtcagacaagctgtcgccaaaaaataccagtctggtaatatcacccaaagaaatatttttgggcttgggatgtgatttattgatttctttggcaagaccaaaagcttccggatgacattcaacctcaatagataaaatattgtcaccattatcatctttaataatcaacttatcggcgtgttcctgtgattctataataaactgttctttacatccctgagacgctaaggctcgaagtttgatgtaggctccgcgaacctgtaccggtgttagattcagttcctgatggtggtaaagattaaagatacattcgagcgcctctgcatggtgggtggtaaagaaatatgctttgattttctcccataaacttaattccggaaggcgtgcgctttcttttatcgcattaaatttttcagaactgatagatgatgtgaaataaccctgtccaacactcaatggcatagtgtcctccttactttattaaacacgctttagcaaataattaattagcaaatattagcaagaaaagtaatcaggtaaatggtgtatatggaattacgcttctttaacagtttttcgtcgccaataaaatacatacaatgtttattgtttttcaacgaagtaaatatatcatcaacaacgtgaggttaatacctggtacatattatctgactgctatcattattgagtgtgcgcctggctaaggcaaagatctaaaaaagaagccactcctgattttagtgtgctggcgtgagtatgagctggcttgatactcaggaaaaacagacaaacttatcatccgactattattgctaaagtgctagtgttttatgtgacattttgatttctattttcatattaaatatttcttaagtgagttaactataatgaatgatgattcaattattaaaaactcttcgatgcttttggcctatttaggtggtttgggatggggaagcgcctatttttatggctggggcgtctccgcgtactatggtttcccgtggtggtatgtaggcgtcggccctgacaacattgcccgaagtctattccatgcgattagcctgatggctatattcataatagcgtggggagtgggtattctattattttttctagtaaagcaaaaagcacgtatccacgaccttagctttttacgtctttttttggcagcggttttgttctttattccaattgttatcgagttttctctcttaacagaatcgtttttgtgggagcttttttttatcattttactggtggctttatgcttatcggtggggatgcgtttttatagtaaattgatgccggtgatttgttttacgcaactcagttgggtgcgaaggcattgtttcactatagttatgcttggttttattatatatttttttatattttctttttttgttgggatctataaaccacaattaaagaaagaatacgaaatgatattgtatgatggaggctggtactacgtcctggccagatatcatgatagttttattttgtcgaaatcctttactaaaaataacaatagatttattatttttagaccagaagatgggcactcttatgaaattactctggtaaaagtcaggctttaataaaatgctggttggcaagagcgtgaaatgacggcagaacttcccatagcaacgattgaggaaagaactgagcgcccatatctgtaggatgtggaatagcaatgccgggaaggacatggcatgacactttatctgacattaccatttgagtgacaggttagcagatgtttcaggccaaacccaagttgaactggagcgctcagaagccgattacctacataacaaatattggccgcaagcttatgctgtgggcggaatatacgaccgctattatccagactggctgttaacttatttattttcccatagtaacctataacaggcctccctgaggcattggctagcatctgtgcattggaaaaacaggctccatttgcactatagcaacttataaattttatttcctcatgagagttgctaatatggcggattgattttgaaagtgatgatgactgacttgcaccggaaccgtaccgattttcatgttgaacaacaaaaggagcaccatgtttacaaatcgaaataggcatggattattacctgagattgatttcaaattaacaataatgatgacgcttttgggtattaaaaatctttcaaataacgctcatttgattttttgtccacattgactaagcctggaaagacacagggttaagatattttcgctacccgtcggcggtgtatcgcagttgtgatgttacgttcttacaagactgacatctgcatatcataacctttattcattaccacctggtgagtaaataaaaactattaagcaaatatttacttctgggtaatgggactggatttaccggcattacctctgtgccccagtcgggcagaacattgcagcttagaaagaaagctttggtgtttattgtctgtggcctgaaaaagttcccatgagctgaatatgctgaatgtgaactgattcttgatggtctatgccggaaatctataagctattgatttttatattgtgtgtaattttacaattacataaacataaaattctgatagtatacccccctatagtatatggaggtcgaatgccgcattcacctgaagataaaaaacgtatccttacccgtgttcgtcgcatacgcgggcaggtcgaagcgctggagcgggcgcttgagtctggcgaaccttgtctggcgattctgcaacagattgccgccgtgcgcggcgcgtctaatggcctgatgagtgaaatggttgaaatccatctgaaagatgagctggtcagcggggagactacgccagatcagcgcgcggttcggatggcggaaatcggccatcttcttcgcgcttatctaaaataacaatttccctcaccgtaacaggaagagatatatgaaatcacgtgcagcagttgcttttggtcccggtcagccgttaaaaattgtcgagattgacgttgcgccgccgaaaaaaggcgaagttctggtcaaaatcactcataccggcgtttgccataccgatgcttttaccctttccggcgatgatccggaaggcgtattcccggcagtcctgggtcacgaaggcggcggcgtggtagtcgaggtcggcgagggggtcaccagcctgaaacccggcgatcatgttattccactgtatacggcggaatgcggcgagtgtaagttctgtaagtccggtaaaactaacctttgtcaggccgtacgcgccactcagggaaaagggctgatgccggatggcactacccgcttttcttataacggcgaacccgtttatcactatatgggaaccagcacgttcagcgaatataccgtttgcgcggaaatttctctggcgaaagtgaacccgcaggcgccgctggataaagtgtgtctgttgggctgcggcgtgacgactggtattggcgccgtccataacaccgctaaagtgaaagcgggcgacaccgttgccgtttttggtttaggcggtattgggctggcggttattcagggcgcggttcaggctaaagccgggcgtattttagctgtcgacacgaatccggaaaaatttacgctggcgggcgaaatgggggccacggactttattaatccgaatgattacgacaaaccgatccaggacgttattgttgagcttactgatggcggcgtagatttcagttttgaatgtatcggcaacgttaacgtgatgcgagcagcgctggaatgttgtcataaaggctggggcgaaagcattattattggcgtagcgggggcagggcaggaaatcaaaacccgtcccttccagctagtgaccggtcgcgtctggcgtggctccgcctttggcggcgtgaaagggcgcacgcagctgccagggatggtcgaagatgcgatgaacggtaaaatccgtttagatccttttattactcaccgcctgccgctggagcagattaacgatgcctttgaactgatgcatcagggtaaatccatccgtactgttatccactttggcgataactgattcatccgccagcggattttccgctggcgcttttctgaattttctggaatgaatgttgtgaaaatgtgacgaaggcgatgcttttcgcgataagcaaacgtcacgaagtgccgatgactatctaacgggcgtgttttacgcataaaacctacaagagagtcgacggtcatgggcaacacattctcgatgcaagcctcgcataaactgggcttcctgcatcatattcggctggttccgctgttttcctccattctcggtggcatccttcttctttttgctttgagcgccgggctggcaggctattttctgttacaggccgatcgcgatcagcgtgatgtcacggacgagattcaggtacggatgggattatccaacagcgctaaccacttacgtaccgcacgtatcaatatgatccacgctggcgcggcgagccggattgctgaaatggatgaaatgaaagccaatattgccgctgcggaaacgcggatcaagcagtctcaggacggctttaacgcttatatgtccagagcggtgaaaacacccgctgatgacgcgttagataacgagttaaacgcccgctacaccgcctatatcaacggcctgcaaccgatgctgaaatttgccaaaaatggcatgttcgaagcgatcattaatcatgaaaacgagcaggcaaaacaactggatgcagcatataaccatgtcctgttgaaagcgattgaactgcgcaccgagcgggcaagactacttagcgagcaggcttaccaacgtacccgactcggtatgatgtttatgattggcgcatttacgttggcgctggtattgacgttaatgaccttcatggtgctgcgtcgcacggtgatacaacccttgcagcagtctgcgtcacgtatcgaacgcattgcggccggcgatctgaccatggctgacgagcccacaggacgcagtgaaattggtcgcctgagtcatcatcttcagcagatgcagcatgcgttgcaacaaacggtaggggcggtgcgtcagggggcggaggaaatttatcgaggcaccagcgaaattaccgctggtaatacggatttatcttctcgtactgaacagcaggctgccgccattgaacaaaccgcggccagtatggaacagttgacggcaaccgttaagcagaatgcggataatgcgcatcacgccagcaaactggcggaagatgcttccggtaaagccagccgcggaggccagatggtttccggggtcgtacaaacgatggggaatatttccaccagctcgaaaaaaatctcggaaattaccgccgtcattaacagtatcgctttccagaccaacatcctggcgctgaacgcggcggtcgaggcggcacgcgccggggaacaaggacgcggttttgcggtggtcgccagtgaggttcgtaccctcgccagtcgcagcgcgcaggcggcaaaagagattgaaggcttgatcggcgcatcggtcagcctgattgaacaaggatctgaagaggttatcgctgcggggagcaccatgaatgagattgtggatgccgtcaaacgcgtcaccgatattatgctcgatatcgcggcagcctctgatgagcaaagtcgcggtattgttcaggtcagtcaggcgatttctgagatggacaaggttacgcaacaaaacgcgtcgctggtcgaagaggcgtccgcggcggcggcttcgcttgaagaacaggccgcccgcttgacgcaagccgttgatgcgtttcatttacaggatactggcgcgacgatgcgatcatccttcctttagtaagcgtcgcgccagcgggctattttagccgcgggcgcgtttattctccgacagccgctatcacagcggcatcgatttacggatcgccgcaatcagcatttgcgccccggttgagagcgggatatcaactcgcgtaagaatacctatcggctcgcccgcgctctgggtcggcacgggtaatgagaccagcgtcgcctggcgaagatcttctttaaccgcgccagaggggacgaaccagacgtaatcgtaatctacggtcagttgtcgtgataacgatgcggatagcgtttcgatacatccggcaggcattttacacccctggctttgcaacagggcttccgcattctggcgcggtaccgtgccttttggcgagacgactaccggccattccataacccggctgagcgtgatcgtctcctgtaacaggggatgaccggggcgtaccactaatttaagcgattctaaaaacagcagttcgtaatttaaaccgcccattaattccgggtctgacatgcggccaatacccagatcgatctcgcctgatttcagacccgcaagcaacatcgtattgttcatggtcgcgacctgtaacgaggtcgatttttgctgttgatggaaccgcccaatagccgccgggagtatacccagcgcagcggtggggagcgcgccaacacgcaccacatcggcgctggcgtcctctttgcgattcagcgcctgcccggcggtattcaatgcatctaatacttttaccgcatgagtcaaaaattgttcgccaggaaccgttaattgcgcgcccagtcgcccgcgttcaaacagacgggttccggtgagttgttccagttcgttcagcgttttagaaagcgctggctggctcaggttaagagtttcagccgcgcgccccagagttccctgttgcgcaacggctacaaatgtatgaaggtggcgcaaccgaatgcgctgactaaacagaccatttttttccataagcgatgttaaaaacagagccgtgcgggtgacaagtaaagttgtttgtttttgataacctgatagcaaaatattattaacattttaccatttcaagttacaactgttttattttactgatgattcaactgccgttaagcgtgttaagccgcgatctggtcggggatatgccagctcatgtcaatccgttctgcataatgaattcaggtcggatcacactttataaattcttctccccggaatggatgaggttttctacactccaggtaacattcactggaggcatgacattatggcgaacaccatcacggcagatgagattcgggaacacttttcgcaggcaatgtcggcaatgtaccagcaggaagttccgcagtacggtacgttactggaacttgtggctgacgtgaatctggcggtgctggaaaataatcccaaactgcatgagcagttggctaatgccgatgaactggcgcgattgaacgtggaacggcatggcgccattcgtgttggcaccgcagaagaactttctaccttgcgtcggatattcgccatcatggggatgtacccagtaagttattacgatctctctcaggcgggcgtgcctgtgcactccacggcatttcgtcccattgacgaggcttcgctctcgcgtaatccctttcgcatgttcacttcgctattacgcctggagctcattgaaaacgcggcattacgccagcgggcggcggaaatcttatcgcagcgggatatttttacatcgcgctgccgacaattgctggatgagtacgacgagcagggcggttttagtgctgctcaggccgaagaatttgtccgtgaaacgctggagacttttcgctggcatcgtcaggctaccgttgatgaagaaacgtaccgcagcctgcatcgtgagcatcgtttaattgccgacgtggtctgttttccgggatgtcacattaaccatctgacgccgcgtactctggatatcgaccgggtacaggccatgatgccggagtgcggcattacgcctaaaactcttatcgaaggtccgcctcgccgcgaagtgcctattctgttgcggcaaaccagtttcaaagccctggaagagcaggtgctcttcgttgatgaaaagcagggtacgcacacggcgcgcttcggcgaaattgagcaacgtggcgtcgcgctgacgccaaaaggtcgtcgattatatgacgagctgttgcacaaggcgggaacgggtaaggataacttcacgcatcaactccatttgcgggaggtctttaacgcctttccggatagcgaatttctgcttcgccagcaggggcttgcctggttccgctatcgcttaacgccttccggtgaggcgcatcgtcaggcgatccatcctggcgacgatccgcagccgcttattgagcgcggttgggtaatcgcgcagccgattacctatgaagattttcttccggtcagcgcagccggcatttttcagtcgaatttgggaaatgaaacgctggccagaagccacggcaatgccagccgcgacgcctttgaacaggcgctgggatgtgctgtacgggatgaattttcgttatatcaggaagcggaagaacgcagtaaacgccgttgcggtctgctttaaaagcggtaagcttcacaggctgtgaggatactgtaaaaggaaggcgttatgttgaatccctccatcccgctggtggcgacgcgtcacggtaaaatcgtgggcgtcgtacaggaagaaacccatatctggcgcggtataccttatgccgcgccgccaacaggggagctacgctggcgtgcgccgcagcctgttacgccctggcaggatgtgcgccaggcggattgtttctcctgcgccagttggcaggatattacctggtgtcgcgaactcggcggcggcgatccgggaaatttttccgaagactgtctctatctgaacgtctgggctcccgccgtgcgtcatgaaccgttgccggtcatggtctggctacacggcggcggttacaccattggcgcggggagtttgccgccctatgacggtcaagcgctggcgaagcgcggcgcaatcgtggtgacggtcaattatcggcttggccatctgggctttttcgcgcatccggcgctggaaggcgaaggggcggagtgtattcataatttcgctttactcgatcaaatcgctgcgctgcgttgggtgcaggacaatattgccgcatttggcggcgatacgcagaatgtgacgttatttggcgaatccgccggcgcccgcagcgtgctgtcgttgatggcttcgccgttggcgaaggggctttttcataaagcgattattcagagtggttatacgctgccggatacgccccgcgaggtggcgctaaaaaaaggcgttgcgctggcggaacatcttggtttagcccatgccactgccgaacagctacgcgctttaccggcagagacgttttggccgctggacgcgccttttaaaattgcgccgacgccgatttccggcgacgtcgtgctgccgcatccgatgctggaaaccttctttgcggcgaaacagcatccaataccggtgatgatcggctcgaatagcgatgaagccagcgtattggccgtttttggcgtcgatattgccggtcaaattcaaaaaatgcgccgtgagcggcgtgttggcctggggttaatccggctgctttatcctggagtgaaaggcgacgaagcgctagggcggcaggtctgtcgggatatggtatttaccacgttgggttatgtcgtcatgcaagcgcagcagcggatcggcgaaccgtgctggcgttactggtttgattatgtcgccgaggcggagcataacacctacgcgaatggcgcctgtcatggcaatgaaataccgtatgtattcgatacgttaacgcgggctgagcccacatgccattatgtgaatgagaatgacctggcctttgcctcgcaggtggcggattactgggtgaatttcgctcgtcatgccagccgcacgcgcgacgtgctgcacggcccggttcgctggcccgccagcattcgggggcgagatcgtctgttgcggattgggctgaacaaacttgccggttttaaagtggaaaaccgctttatgcgtgcgcgtctggcgctgtttaaacgagtcatgaaacatcacgttagtctggaataaacttttcataacctgaagaatgctgcgtgaggtttacatccgattcggtcggttcttatcgacataaaatatttacgcttttgcacagtttccaggcgaccaacaattggattattaatgaattttgtctagagtgagcggtcagaaacgggcacattcttgctgctgaaaaaaccagcgcgggaccattcacaagaccagaaggactcattttcaggtatgaatcgtagacgatttattaaaggttcaatggcaatggccgccgtgtgcggttccagcggtattgcttcactcttttctcaggcggcgtttgccgcggaatccgatattgcggatggtaaaattgtccgttttgattttgctggtctgcaatcaatggcccaggcgttagcgaaaaagccctggggcggcgcgccgggacccttgccggatacgctcgccaatctgacgccgcaggcctataacagcattcagtatgacgcggcgcattcactctggaacggtgttgccaaccggcagctcgatattcagtttttccacgtagggatgggctttcgtcgtcgcgtacgcatgttttccgttgatacgacgacgcatcttgctcgcgagattcattttcgcccggaactgtttaaatacaacgatgccggcgtcgatacgacgcaactggaagggcagagcgatctcggtttcgccggtttccgtgtctttaaagcgccggaactggcgcggcgcgatgtcgtctccttcctgggcgccagttatttccgggcggtagatgatacttatcagtatggcctgtcggctcgcgggctggcgatagatacctatactgacggtcaggaagagttccctgacttcaccgcattctggtttgacaccgcgaagccgggcgatactacgtttaccgtttacgctctgctggacagcgctagcgtgacgggcgcgtataaatttgtgattcattgcgaaaaatcgcaggtgatcatggatgtagaaaaccatctctacgcccgtaaagatataaagcaacttggcattgcgccgatgaccagtatgtttagctgtgggaataatgaacgtcgggtatgcgacaccattcacccgcaaattcacgactccgatcggctggcgatgtggcggggtaacggcgagtggatttgccgcccgctgaataatccgcagaaattgcagttcaatgcatatatggacgataacccaaaagggttcggcctgctgcaactcgatcgcgatttctcgcattatcaggatgtgatgggctggtacaacaaacgtccgagcctgtgggtggagccgcgtagtaagtgggggaaaggcgcagttagcctgatggagatcccaaccactggcgaaactctggataatgtggtctgtttctggcagccggaaaaagcgatcaaagccggggatacgctggcgtttaattatcgtttgtactggagcgcgcagccgccggtacaatctccgcttgcgcgggtcatggcgacccgtacagggatgggcggctttcccgaaggttgggcgccgggcgaacattacccggataaatgggcgcgccgttttgctattgattttgtcggcggcgatctgaaagcggccgcgccaaaaggcattgagccggtgattacgctttccagtggcgaggcgaagcagattgagatcctctacgtcgagcctttcgacggttatcgtatccagtttgactggtatccgacctcggattctacggcaccggtggatatgcgtatgttcctgcgctgccagggggaagctatcagcgaaacctggctgtatcagtatttcccgcccgcgccggataagcgccgttatgtcgacgatcgtatcatgcgttagtcagtttgccttctgtaccgccacaaaggcggtacaggttccggaaatagccctgacataaactcattcgtgagccgctgtttttgtgacacggcctttccatcgttctatttttgcaacagtccttcctgtttatccctctcgatcctgcggacagggaacattaagatagcttcaccttatttaagatataaagtgaatataatgaaaaagagctttcttggtgttgtcctgtctctgggtttattaagtgctgctcatgcagatgtatataaatttgataatacgcataccaatgcggtatttaatatcgatcatttccagacctcaaccaatcatggcgggttttatgctattagcggcgaactgaaatatcagccggaaaagcaagatgcagagatgcgcgtgacgattcccgtgagcgccttaaataccggggtggatgcgtttgataaccatattcgcagtagcgatattctggatgcggaaaaatatccagaaatggtatttaaatcaacaaaatggcattttgaagataataaaccggtttctattgacggtttgctaacaatgaagggagtaacgaagcccgtcaccttaaccaccaccaagtttggctgttatatgagcccgatattcaaggcgcaggtttgcggtggtgattttgtcacgcaaatagatcgcacccagtggggggtagattatctggtcgatatggggatgacgaaagttgtcgatataaaaattcaggcagaagcggttaagcaataaagggaatgatgatgaaaattattgtatgttaagggggcttggctatttgaagcttcgctgatttcaggccgcactgccacgattttaaagtgggactatgtcactaaatagttgatggcaactatttcggattcagatatgttaaattgctctactacttgagcttgtaaccaacggttattttgtccctgatgtctctgtagatttgattttttcgatcgcaataatattgcctgacatcgcttcattgagcacttcgacggccgtgctggcatcgcgattctttatcgacatgtagaccttgatatgggcttccacactttcaagggtaatacccagcgcacggttaagctcttcaagatagtagtaatagatgtctttaatcgagctcatcacgttgtagaacacgctgttgtgcgatgccctgacaatcgccagatggaactcgtagtccgcttccgagtattttttataatcacctttgtggatcagcatgttgttcaatgcttcctcgagctggcgaatgtcatcatcggtggcgtgtgtgacggcgagctccacgcatttgaactccacggtctgacgaaaaatcatcatatcgtgaaactcttcgcggctaaggtgcatgattgggcggggatcgttactcaacatctgcggggtgaagttttcgctcacgtagctgccgctgccctgacgcgtcaccacaatccccaggtcacgaaaacgctgtactgcgctgcgaacgctgacccggctgacgttaaatgaggcggtcagttccacttctgagggcaaacggctacccggcgcccaactgccgtccagcagtttgctacttatctgatcataaatttcatttacaacattctgtttttgaatggattttatgctcaagatgggtatccgttaagatgtcgctgaagtgctttattatataacaattctcttttaagaacaaagcgcccggccgggcgcttttcaccgttaatcgaaacgaatgagtaccttagcagagacatttttgtctgtggcggtaatcagcgcgtcttcaatttgctggggcgggaactcggcgctgataagcgggcgaggatcgacgcgcccatcttccagccagcgtaccgcggtgatgaactcaccgataaaacggaatgagccgacccagttgagttctttaaccagcatcgttgacaccggccagcttaccgggctggcgcccatccccacctgaacgatggtgccggcagggcgggtgaagtcgacggtggatgccacggcaatcggcgcgccggaggcctcaaacacgacatcaaagtagcctttatgctgctgataatgggcaacctgttcttcatcgcgcggatccatcaccgctgtggcccccatttggcgtgccagttccagacagcgtgggctgagatcggatgctaccagttcagatgctccggcactgcgcgccgccgcgaggatcagacaaccaatggggcctgcgccaatcaccagtacgcgtttgccggtcaactggcctgccttttttactgcatgaatggcgaccgccagcggctccgaaaaggccatcacgtttgcgggcacgcgcctgtcgtaaggaatgcattgctccggttttaccaccacgtattcagaaaaaccgccattcacatgcggattgaactgcgcgctgcccataaagcgcatggagccgcacagattttgatggccggaaaggcacatctcgcactgattgcatgggctggacgggttcaccgcaaccgtctggcccactttcaggtcgctgcctgctggcactttgctgatcacgccaacaaactcatggccaatcaccatcggatgcttgaggacagacatccccgcgcggccatgctgatagtagtgaatatcagagccacagatgccgccgcaggcgaccttcacgacgacgtcatgttcactgtgctcgatttcacgtgattcaaagcgtacgtctttttccgcatgggccagacaagcgttacaggttattttttccattttgataatgacctcattatttgttggcagttgccgggttaatggcattcttatccacagtgtcggcattcttttttccaggcaggatcacttcaattttgcccaccaggaatatgtaggctaataagcccagtccggcgacgcctgcgatataccacatggcatactggaagttttgcgtgcgctggagaataaccccaataacaattgggctaacgatccccgaaaggttgccgcaaatatttaaaaagccacccatagtcccgagaaaattacggggaattacatcgctccagaccacccagcccaggtttgaaaaggcgttggcaaagaacgcaacagacagaatgacaatcgcaataactggctggttttcaaagaaattgaccaggccaataatcatggtgacgcacaggccagccataacgggtaattttcgtgccagcgttcgggattttccttttttcagcagcatgtcgcttagcgtaccgccacagagcaccccaagcatcgccataatatagggcagcatggcgcctatcccggctttggaaatagagagatgcagtcctttttccaggtaaacaataaaccaggtcaggaaaaaatagagcgtagacgagcaggcaaactgggtgatgaacaaaccccaaatcgtttttttgctgaggaagaatttaatattttgccagctgatttttgcactcacggaggattggttctccgagccatagccgccgcctgctttgatataatccagttcggcctggttcacagcagtgctgtgctgtggatcgcggtaatacataagccagtagatgccaaacagaataccggcgccaccggacagataaaacgacatttcccaaccgtagttagccacaataaaggcgagggcaggcgtcagcagcgcgagaccgatatattgtgcactggaataaatcgcggtcgcacgggcacgttcatggtccgggaaccaggtggcgattatttttgtgttagacgggaaggatggcgcttcggcaacaccaattaatgcgcggcaggccagaagcattgcaaatgaagcggttgccgtcgcgaataaatggtgtgaggcgaaccccatcataaaggtaaaaatactccacagaataatcgcaccaccataaagaatacgtgagccaatgcgatcaagaacatagccgacaggaatttgactggcagcgtaggcccaggtaaacatggagaaaagcaaacccagttgtgttggcgtcagactgaaatcattctggatattcgaaccagcgacggcaagattggcgcgatccatataattaattgcagtcacaataaacagcaatgtgagaataaagagtcgttgtcttgaagccttcataataatacctgtgttatatcggcatgcatcggggtaaacacatgccatcaattttaaaggcgagtaggtagagtgcgggcgacttataaaactgcgagccagccaccatcgacgtaaataatctgcccgttgatataatctgatgctttggatgataagaagatggcggtgccgatgagctcttccggacgaccccaacgttgagaaggggtgctgcttttcacccagctatcgaactgcttgtcttcaataagcgcggtgttcatgtcggtcagaatgtagccaggtccaatggcgttagtctggatattaaactgcgcccattcagcagccatcgagcaggtgagcattttgatgccgccttttgctgccgtgtacggggcaacagtcgggcgggccgcctggctggtaagcgagccgatattaataattttgccgccgctgttgcgggcgatcatccgttttgccgccgagcgggagactaaaaatgcgctggtcaggttagtgtcgatcaccttctgccagttttccagctccagctcgaccattggtttgcggtactgaataccggcgttattgatcaggatatcaacatggatcccttctgcatcaagtttgctaaaagctgcctcaatcgccagttcatcggtgacgtcaaaagccacgccatgcgcgtcgtagccttttctggtcagcgtatccactgattcggccaacagcgtggcgcgaatatcattcaggataacccgtgcacccgcagcggcaagaccctctgcgtaggcaaagcccagtcctcgtgcagaacccgttaccagcgccgttttcccagttaaatcaaataaagcggtcatgttgtttcctcacttgtttaatttgtatgacgactatccttttttaggttgaattttcgccctgataaaatcaacagttcacccatgaatttgcaacaaggatcacaaacagctccacatgccgaccgcgtaattaatattaattaattgaattatatgtatatatttggtttaaatttaacgcagtttgatcgctgtcacagaatggcactcgcagcgatccgctgtaaaagaagcgtgatataacagcataaagttgtaggacaacttacgtatatctgttgtatcatccacaacggtatgacatgcggtaaattcgctgagttaaggagtgaaagtgagtaacctgaaaattaccaacgtgaaaacgattctgacggcgccgggcggcattgatttggcagtcgttaagatagaaaccaacgagccagggctgtatgggctgggatgtgcgacatttacccagcgtatcttcgcggtaaaaagcgcgatcgatgagtacatggcgccttttctggttggcaaagatccgacccgtattgaggacatctggcagtcaggcgtggtgagcggctactggcgcaatggcccgatcatgaacaatgcattgtccggcgtggacatggcactgtgggatatcaaaggtaagctagcggggatgccagtttatgatctgctgggcggcaaatgtcgtgatgggatcccactgtactgccacaccgatggtggtgatgaagttgaagtggaagataacatccgagccagaatggaagagggttaccagtacgttcgctgccagatgggaatgtatggcggtgcggggaccgatgaccttaaactgatcgccacgcagctggcacgtgcgaagaacattcagccgaaacgttcaccgcgcagcaaaacgcccggcatctactttgacccggacgcctacgccaaaagcgttccgcgtctgttcgaccacctgcgtaacaagctcggttttggcatcgaatttattcatgatgtacatgagcgcgtgaccccggtgactgccattaatctggccaaaacgcttgaacagtatcaactattttatcttgaggatccggtggcaccggaaaacatcgactggctgaaaatgctgcgccagcagtcttccactccgatatccatgggtgagctgtttgtgaatgtgaatgagtggaagccgctcatcgacaacaggctcatcgactacattcgctgccacgtgagtaccatcggcggcattacgccggcgaggaaacttgctgtctacagcgaactgaacggtgtgcgcaccgcatggcacgggccgggcgacatttctccagttggggtttgcgccaatatgcatttggatttgagttcaccgaactttggcattcaggaatacacgccaatgaacgacgcgctgcgtgatgtcttcccgggctgccctgagattgaccacggttatgcctatctgaacgataagccgggtctgggtattgacattgatgaagccaaagcggcgaaatatccgtgcgaggggggaatcccatcctggacaatggcgcgcacaccagacggtacggcctcaagaccgtaagcaatgaaggcccggcttgcatctgccgggtcttattcccgacgtcctgatggactccgttttagaaacaggaattattgtatattgaggctgctttttaatcagtgaccacttctctataaggagcctgaatatttccctcaacaacgcttccggtagaaaatgacgcgctctgtttcctcaaatcctaatgccaggtgaactttctgggaaattgtattttccggcgtggtatcagaggccatttcccgacaccctttattcgttccccatcgttgcaccgctgcaatcaattgtttcgctacgccgcgttgacggaacgaggggagaacaaaaataccttcaagaaaagccacgggcgaactgtcacagccattgacataatcgtggcggattgaggcatccgcaaagccaatcgccaccccgtctgccatcgcaacaaatgatgccaaatgatcggcttgcaggatttcttcgccgtctgccagatgggcgtcatccgggtgaccgggccagagctgttttcgcaatccgcgccagtgctccagatgggttttgttcatttgcctgatgtccattaacgcactcctgatgaggggtctggcatgatgagacggcaccccgcctgctgataacgtcgggcgatagcagacgggagcgcgctgtcgctaagaatggtagtaatacaggacagcgtcgccaccgcatggggttctacagtatcaaactttgagtgatcggccatcaatatgacctcgcgtgagcgctgaataatgcgcgttttaacgcccacttcaaacatggtagcgttggtgatgcccgtttcaatcgacagcgcatcgcaggagataaaggcgcgttcaacggcaaaggcgttaatcatctccagcgccagactctcgcccaccgaaaagtaaccggggcgaatcagtccgccgataatgtaactctctacgtgtgggaagccacccagttcattagcgattttgatgtcattgcaaatgacttttactttggcgtcgaccagacattttgccagttccagacaggtggagccggagtcgagaaaaaagcagtctccatccttgatgaacgtgcgggcgagggcagcgatttcgcgtttcgcctcgctttgtaacgtccgcttaacgtcgaaaacatattctttatcttccgtactgtcgtcgaagtcaatacaaccatggccgcgaaccataccgggataacggctggcaatatagtgaaaatcccggcgcacggttgcctctgcatagccaaaaagctcaatagcttgctgtgttgagaggtgcctgtgttgccaaaggtaatgcaacatctgtttgatacggtcggggcgctgttggctcatcagcatatgactcctttatagcgcggtgaattgtgacaacgtcacatcatagttcgccgtcgtgaataacgcccggccaatcaccagatgctgtgcgcctgcggcggcaagcagccgtgcggcgcgaagtgtaataccgccgtccgcccagcattccgcagcagggaaatgctctctgccctggctcactttttcacacatcgcggcgataaattgctgtccgcgtccgtcgggttcgctggtcatgatcatcagcgcatccagttgcaatgccagataacgataaggcaatagcggcgttgccgggttaagcgccagtcctgctttcgccccgatagcgcgaatatccgccagaatctccggggggttttgcacgctttcggcatgaatgaaaatccagccggggcggatagctgcaagccagggtagccagcgttgcggtgatgagaccatcaggtgaaatgagagcggatggcgggtgtgttgtgcgactgcctgaatggttttcataccgaaggtaatattgttgatgaaactggtatcttcgatatccagatgcaacgagccgaggggcgcatcgtgtaaagcggtcaacgcctcggcatagcgcagcggatcggcggaggccagtgaagggtgcaggatcatcgaaacctccatcagcgcaatgcggttaattgcgcgaaaagcgcggcgtcatttggcgcatcttgcagcatcgcgacgctttccggcgagtctagccactggctgatgcgttgaatggtgcgaatatgtgcttcggcatccgtggcgctggcgcaaagcaacagccagatgggatcgcaatccgcattgccgaaagcgaccggcgttgctaacgtagtgacgctgatttgattatggttggcgccttgctctggtctggcatggggcaacgcaatccccggcgcgataagataatatggcccccatttaagggtgttctcaataataccgtccaggtagcagggggccgccgcgccgaaggtaatcagcggacgaacggcgatatccagcgcgtgtcgccagtcgctggcatggcgttgcgcctgaacccacttaacatcattaatcatcgatcgttgactccttgccggttcgggttactctgaaaccgatccccggcgtgtcttttggcgaaggcgacggagatcggcagaagagttatcgctctctgcaggggataagcgttttgcttatccccattttattgtcggatatggcgtactttctccataaacttcgccacgcgcgcctggtcgacaaagttggcgaagacgccgtcttttttaaacgtggttgccgttacgcatccgtcggcaatgcagagctgctcctcgacgttttccagacacaccccggtattcgccagcacgaccgtgtcggggacggtctcttttacccgcttcagtatggcgctatccgtgcgagcgcccgccgtcagccccgagacgcacagggcatcggggttattgttaaatacggtcgatttcgcaattgaacagacatcccggtttcccagatacaccgccgcttccggcacgatgttaaacagcgttttcacgtggcctgcgccgatgcgatgctgatggcgaatggtttcgccgacattcgtatcccagacgccaaaatcgctggcgtaagcgccggtgaaaatttcgcgaataaattttgcgtcggtcgccatcgccaaatcaaacgaggccacagggtcccacaacacgtttaccccaaacggtacgcggatttcactcattaactgaccgatgattcttgccatcgcggcggtcgtttccggtctgactttcgttaaataaggcagactaaattcgttggagaacatcaccgcatccacgccgccattttgtagcgccattaaatcgtcatgggcgcggtcaattacccaattcatgcctttcctggtatcgaacccgggatcgcccggcagcgcccgtaaatggcacatggcgataacggctttttccgttcctattacctcttttagccaactcattctgggttgctccttattccggtagttcacgtttacgtaagacaagtatgatgctggcgacaatgccgaccacaataaccacaccaatcatgcccagcgacatcaattcagatattgaccagccaaacatatttcccaccgacagcgcggtaatttgcgcgttttcagcggcgaagctaaagccgcctttgagcgccatatcggtaaagtacggcgcgaactgggtggcgatcagcaaaacggtaatcatgacaatgatgccgctgagcagagtacgaatcagatcgccgcgatgaataaccgtggccatgcagataaaaaacggcgcaaccggtaaatcagccagcggcaggactttattgcccggcagtatgctcgccagaattaacatgatgggaattaacagcagtccaaccgcgatggtggtcgggtggcctaacgtcactgcggtatccagaccgataaagacttcgcgccctttaaagtgtttctggaagaacttacgcgcgccgtcggaaatgggcattaatccctcaacgataaggcgaatcatgcgcggaaacagcaccataatcgccgccacggtaatcattaaggttgcgcaccctttaaagccttcgcctgcggcaagtccgaagatcagcccgagaacaacgccaatgatcaccgggtcgccaaccatcccataccgtttttggatctcctgagcatcaatattgcgtcctttcataaacggtattttttcgtatatcgcatccagcaatacgaacaacggcacggaactggagccatacccttgcggaatagaaatcccttccagacccacaatgttctgtactcgtttcgccgtccagtcggccattttcaacgacaaggcggcgtggcaaatcgcgcccagtacgccataaatcagactgccggtcatcaactggacgaccgttccggtaatggcgtagtgccagtagttataaatatcaacgttcatggttttggtcagacgagtcaccagcataccgacgttgagcagaaagataacgggaatgatcatcgcgccgatggccgtcgcatagccgacgccggatgcgggcccggcgccgacgtcaaacacatgcagcgtcaggccaaaacgctcaatcatcactttaatcggcggactgagactgtcgatcgccatgacgatcaccagccccatgccgacaaaaccgatgccgaccgtcaccccggctttcaccgcctgcagccagggaatacgaaagattaagccgatgataatcataatgatgggcacaaaaacggtgccgccgagagacaggatgtaatcaaacataatgccccctttattgtgttaacagcgccttgatttcttgttttaatgcgtcgtcgttgatgcctgtcagcagggcggcgccgttgagcgtcgggatgccatagtcactgtgcgtacgcatggacgttacgatgagatccataccgttacaattcaacgggatctcattcagacaacattgcgccgtggttgccgcaatgccttgctccgcaagaaagtcctgcagtttttgtgcaatcatggttgatgtcgacatgccggtaccacatgccacaaggatctttttcatcatggtcgtgcctcttgtgtagcgcctgtttcaggctcaatgggaaactgttctggcgacatgttagccagcgcagtcagtaaacggatacaatcagccaggtcgcgcaggctggcgacttcggctggcgagtgggtatagcggcagggaatagaaagactggcgcagggaataccgtccagttcaacctgaatgtagccggtttcggtgatgacgcctggcgcgacttctcgctgtacgggaatattattttcgtgcgcggtggtctccagcatccgcagcaaacgcggcggcgtaatcagtcccgccaacgtaccgcgtccgtgatagttcagacaggtgatgccgacgccgtggttgacccgcacatcagagtaatcctgcaggtcaggcgtgtcgcaggagggggtgatatcaataccaatcgccaggtcggggcgcacgcgtcgtaaaacgggaacaataccgcgaatattgaactcttcctgtaccgacgcgaccaggaataccgcgatatcgagcggtgtggaggcgagggcctcggcgacgcccagtagcgccgtacaccccagcctgtcatccagcgccttactgcacaccaggtcgttgcccagacagtgcggcgggttgtaaagggttactggcgtccccacctgaatacccattcgttcggcatccgctttatcttttgcgccgatatcaatccagagtttatcgagcgcgggaggctgggtgcgctcgtcacccttcgcgaagtgatatgctttaataccgatacagcccatgatatcgcctgaacgtccggcaagcgtcacgaccgaaccgggcatagtaatttgcgccgggccgcccacgcgttcaaaacgtaaaaagccggagggttcgatcttgcgtaccataaaaccgacttcatccatatgcgcaaaaatcatcaggcgaagcgcgtcggatttgtcgctgccataacgggcgacgacattgcctaagcgatcccgccagacgtctttggcctgctgttcaaacgcgtgctgcataacgtttgcaatactgctttcatgtcctgaaatcccgtttagccgcagtaaagaaaaaagcgtttcctgcacagaaaaggtcattggcgtctccgtggtgataaaacaatcagtcgttgagcgttttataggcggagaatggttggataagtgtgaaatgtgtcacgcggaaatacgctaaatatggccaataaaaaataatgtgatggcgatacaataaaaacgctcatatcacctgcgggttatcggtaaaccaggctatttatgtgatcacgaccaacaacgaagaagggcaacgcgatggtggaaattattcctgttagcacgacgctggaactgcgagcggcagatgaaagtcatgttccggcgctgcacgaactggtactcaaaaacaaagcgtggctacaacagtcgctcgactggccgcaatatgtcacgtcgcaggaggaaacgcgtaagcatgtgcagggtaatatactgttgcaccagcgtggttacgccaaaatgtacctgattttctgccagaatgagatggcgggcgtactctcatttaatgccattgaaccggtaaacaaagccgcctatatcggttactggctggatgagtccctccagggacaagggataatgtcgcaatcattacaggcgctgatgacacattatgcccggcgcggcgatattcggcgcttcgtcattaaatgccgcgttgataatcaggccagtaacgcggtcgcacggcgcaaccattttacgctggaaggctgtatgaaacaggcagagtatcttaacggcgactatcacgacgttaatatgtatgcccgcattattgatgcggattaaagggaaccgactaagggggtacgcgtaatacgatcctcgccattgatcacttttgggccgcgcaggtgaatagtattgccgtcaaaggctatcaccgccgcccgtccgctaatctcgacctggtgctcaatcagaatttcgccctgtatacaggcatggccttcaatcagcacgcggtcgtccagtaaaatcgggcctccgcgtacctcagcatgtccgcctaccagcacatgatgttttaacacacagttgccttcgattaacgcatgttccgctacctgcgagctgtagcgaagggtagggatcgcatcttcctctgtaccggcgataacccgcgcatggccatagactttggcgcagtcacagatccagacattattgtctttgttgccttcgatgagcgcgaaatcaaagacctccgcccggtgctcaataaaagcgtgtgtgatagtggcgtcgccataaagctgtacctgatggacaatccgcgaatggttcacggtggcgcgatcgtaaatttgtaaaatctgcgcatgttcatgcgttagtccctgaacggcgagaatttctgactggtttaacacgcgggcatcgccataaatcgcacactctccgcgcacggaagaggactgaatggtgacgttgtcacttatccgtgcgccatcgctgatatcagcgcgatcaacccagacgttatcgcctattcgcacgttattgtagagcgtgcacggcagcgtgatacgcgcgttacccgtaatttccgtgcccgcaaaggccatcgcgttttcatcataaatccagcaatccccctgttgtgacagcacattatcggcatcaacccagccgccggaggttccggctttaacatcgttaaaatccgttacggcaataacttgtcgtaataagacgcttttcttctcaccgtctacctgataagtaaaagcacgaggttcttcactcagtcgatatttgatcatagggaaattccgtgtgaacgattaagataaccgtagcaaaggtactggcggaacaaccagaaattccataaaatgcatttcaaatatactttataaattaaacaaaatgcgtaatcacaagcagagcgatcgcgtgctcaatctgcctgcgggctattttggcatcgtccttggcactatcggtatgggattcgcctggcgttatgccagccagatatggggaataagccactggcccggcgacatcatggtgatcctggcgatgattatttgggcactcttgaccctggcgttccttagccgtctggtgcgctttccccatagcgtgatggctgaagtgcgacatccggtaatgagcagttttgtcagcctgtttcccgccaccacgatgctggtcgcgatcggtttcgttccctggtatcgcccgttggccgttgcgctattcagcgtgggggtcgtcatacaactggcgtatgccgcctggcagacggcgggactttggcgcggagcgcatccggaagaagcgacaaccccggggctttatctgcccacggtagcgaataattttatcagcgctatggcctgtggagcgctcggttacaatgatgccggactggtgtttttaggcgcaggcgtcttttcgtggttaagtctggagccggttattttgcagcgactgcgtagctgcggcgaattaccggcggtgctgcgtacgtcgctgggtatccaactggcgcccgcgctggtcgcctgtagcgcctggctgagcgtcaatggcggggagggcgacacgctggcgaaaatgctattcggctacggtctgttacagcttttatttatgctgcgattaatgccctggtatttatcacaaccgtttaatgcttccttctggagtttttcgttcggcgtttccgcgctggcgaccacggggttacatcttggtcacggtagtgaatcagggcttttccatattctggccgtcccgctgtttattttcactaacgctattatcgctttattgctggttcgtacatttctattgctggtgcaggggacgttgcttattcgcactgagcgcgctgcactgttgaaaacggaggaaaaaaatgaccgttcgtgacgaaaattactttactgagaaatacggtttaacccgcacgcattcggatgtgctggcggcggcaaaggttgtcgcgccaggccgaacgctggatttgggatgtggcaatggccgtaatagtctgtatctggccgcgaacggttatgacgttaccgcgtgggataaaaatccggccagtatggctaatcttgagcgtattaaagcggcagaagggctggataatctgcaaaccgaccttgtcgatctgaatacattgacctttgacggtgagtacgactttattctctcgacggtggttatgatgtttcttgaggcgcaaaccattcccagtttaattgccaatatgcaacgctgcacaaaacccggcgggtataatttgattgttgcggcaatggatacgccggactttccctgtacggtgggattcccgtttgcttttaaagaaggcgaattacgccgctattacgaaggatgggacatgctgaaatacaacgaagatgtcggcgagcttcaccgcacggacgaaaacggcaaccgtatcaaactgcgctttgctacgatgctggcgagaaaaacggcctgagcgatgcaagttctgtaagtctcgctgcgttcggcatttttttgtcgggcgctgcgttcaaattgtgctgtcgttaccatttttagtgcatccagaatgatttcgttttgctattatttcctttgcatcattgcgaagactaaagggatcgtttcatgcgtactcatactttatttaaagttgcagtgcttactggcttgctggcgttatccggctgtgcgtctaaagtcacacagccggataagtattctggattcttaaaaaattattcggacctgcaggaaactacctccgccacggggaaaccggtgttgcgctgggtagatccacatttcaatgactctaactatgacagtattgtttacaatccgataacatactatcccgtccccaaaccaacgacccaggtcgggcagcaagttcttgataaactgctggcttatacgaacactaaagtaaaatcagcaattgaacagcgcaaaccgctggtcacgacgccagggccgcgcagtttgattttccgcggggcgattacgggcgtggataccagcaaagaagggctgcaattctatgaggtgatccctgtagcgctgattgtggcgggcacgcaaatggcgacgggccaccggaccatggatacccacctctattttgaaggtgagctgatagatgccgcgaccaacaagccggtcgtcaaggtagtacgccagggtgaaggtaaagacctgagtaactccagtacgccaatggcgtttgagacgttgaaacaggtcgtggatgatatggcgacggatacctctatgtttgacgttaacaaaaaataattctgcggcgccatcgcaagatggcgcaaaccccggcagattagcggtcaccatcagccagacaacgatgggcggcgcgttctcgttaatactgcatagcctatcccgccagcgatcaacccccagaatgccgatccgatgcccatcagcgttagcccgctggcggtgacgagaaatgcgataactgccgcgtcacgctcactttcgtgagtaagcgcctgatacaggctaccgctaatcgtacttaacagtgccagaccagccagcatttgcacccagctaaccggcagggcgaccatcagcccggttatcgaaccgccaaaccacccggcaagtaaataaaaaacgcctgcggcggcggccgctaaccagcgacgcgttggatcggggtgcgcgtccgggctttgacaaatggcggctgtaatggcggcaatgcagatagaataaacgccaaatggcgaaagcagcagcgccagcaatccggtaaaaatcattaacggagagacaggaagctgatagccagacgccttcattgtggcgacgccgggggcgttttgcgatgccatcgtcaccaggaagagcggtaccgcgacgctcaggctttgagcgaatgaaaagtgggggggaacgaaggtgggccacaccggcgcgaaatgaataccgctcatcgccaccttaccctggatgagcgccaccgttattcccatcaccatggcagcaataacggcatagcggggcgcgaatactttaaagagtagccacgccaatagcataccgccgcacatgacaaactctccgttgagcgtcccgaacgcctgcaggccgaagcgtagcagtattcccgccagcattgcagcggcaagagaatgggggattatccgcatcaaacgcgcaaacaatcccgtgacgccgcacagcacaatcagggcattggcgacaatgaatatgcccaccgcgtctggcaacgataatccctgaagccctgttaccaacagagcggcgccaggcgttgaccaggcggttaaaaccggcgcacgataccacaaggttaacgttagtgtgcttatgcccatggctataccgagggcggtcatccagccggcgatctctgcgggtgttgcgccagcggcaagcgccgcctgccagataatggcggcggaacttgcatagccgaccagaacggcgaccagaccggataatacagtaggtaacggcagtgataacagacgcatgatcgcctcttgtgcgttataacggtcagtcaatgtagcattgtgcgttatagcgtacaagtgatacgctatggccttactggggggggaaaatggataacctgacacactatctggcgaccacgttaagaatgttacgccatcagcgaggctggagtttatcgcgtctggcggagatctccggcgtctcaaaagccatgttggggcagatagagcgtaatgaatccagcccgacagtcgcaacgctgtggaaaattgcgacgggcctgaacgttccattctcagtgtttatttcgccgccgcaggccgaatttcctccgaccttcgatccccagcagcaagcgatggtaatcacaccgttgtttccatgggatcctgaactctgttttgactatttttccctattgctggcgcctggcgcggtcagcgaatcaacgccgcataaagccggcgttgtcgaacatgtggtggtgattcagggtcggctggacatgtgtactggtggggtatggcaaaccatagacgccggtaaaggattgcgttttgccggtgatatggcgcatacctatcgcaatagcagtgaccagacggttcattttcactcgctgatccattacccgcgtggttaagcgggaaaactatttcgttagtttgcgcttctgactacaatagccgccatttcgctgctattggataagaaagactgtatgcgccagcaacctcactatctcgaattattaagtccggcccgtgacgccgcaattgctcgcgaagcgattttgcatggcgcagatgccgtctacatcggcggacccggttttggcgcacgtcataacgccagtaacagtctgcgcgatatcgccgatctggttccgtttgctcaccgttatggcgccaggatttttgtcacgctgaatactatcctgcatgatgatgagctggagcccgcgcagcggttaatcaccgatttgtacgacaccggggtggatgcgctgattgtgcaggatatgggcattctggaactggatatcccgccgattgagcttcacgccagtacacagtgtgatattcgcagcgtggaaaaagcgaagtttcttgccgatgtcggtttttcacagattgtactggcgcgcgagcttaatttgagtcagatagcggctattcatcaggctactgacgccacgattgagttcttcattcatggcgcgctgtgtgtcgcttattctgggcagtgttatatctctcatgcgcaaaccgggcgcagcgccaatcggggcgactgttcgcaagcctgtcgcttaccgtatacgttaaaagacgatcaggggcgggtggtctcttacgaaaaacatttgctatcgatgaaagataacgaccaaacggctaacctcggcgcgttgatcgatgcaggcgtacgttccttcaagattgaagggcgctataaagacatgagctatgtcaaaaacatcaccgcgcattatcgtcagatgctggacgcgattatcgagcaacgtggcgatctggcgcgtgcgtcggttggtcggaccgaacacttttttgttccctccacggagaaaactttccatcgcggcagcaccgactattttgttaacgcgcgtaaaggtgatattggcgcatttgattcaccaaaatttattggcttgccggtaggtgaggtgctgaatgtggcgaaggattatctcgacgtagaagctacggagccgttggcgaatggcgatggtctgaacgtgttgattaagcgtgaagtggtaggttttcgcgccaatacggtggagaaaaccggtcataaccgctaccgcgtttggccaaatgatatgcctgccgacctgcataaagtccgtccgcatcatccgttgaatcgtaatctggatcataactggcagcaagcgctgacaaaaacctccagtgagcgccgtgtggcggttgatatcatgctgggcggctggcaggaacagcttattctgacgctgaccagtgaagacggtgtctgcatcacgcatacgcttgacggggtatttgaggaagccaacaactctgaaaaagcgttgaataacctaaaagccggactggcgaagctgggacagacgccttactacgcgcgtgatatgcaggtgacattaccggcggcgttgttcgtgccaaatagcctgctcaatcagttccgtcgggaggcgattgatatgcttgacgcggcgcggctggcccattatcaacgaggtcgtcgtaaacccgtggcgcagcctgcgccggtctatccgcaaacgcatctcagctttctcgctaatgtctacaaccacaaagcacgggaattttatcaccgttacggcgtacaattgattgatgcggcctatgaggcgcatcaggagaagggcgaggtaccggtcatgatcaccaaacactgcctgcgttttgcgttcaacctttgtccaaagcaggcgaaaggaaatattaagagctggaaagccacgccgatgcagttggtgcatggcgatgaggtactgacgctaaaattcgactgccgcccttgcgaaatgcatgtcattggcaaaattaaaaaccacatcttaaaaatgccccagcccggcagcgttgtcgcttcagtgagccctgaagcgctgatgaaaacgctgccgaagcgcaggggcgtttaattaacgaaaatagctttctggtttgcgcgatttctgccagttgtggtgctcgcgcaagccttccgcggattcttccgctgccgcccgtaattcatcgctgtcggcttcgtgtctaagctggtgccctcccgtcgcaaaccatacgaacgcgtggtcttgctgtttcgccagtaactggcctgaaaacagcgcacaggtcagtaaaactactgataacgtttttgtaagcatcatgccaccttccagttacgtcgtgaggctatgatgccaataatttctttgagttattattccacacttcaaattagcgaaaacggtttgtcaataagtgcgataagttgtatgagaaaatatacttatactcagtatatcaattataaaaataacgagccaattcgttccatagtaaatccattattccctgggagtatatatttaaagttattgtattagatggttttggtattgccaggggattgtaaatccatactatttatggtgtgatcaactctggtgatgagcctcattttttgttgtttcaacgagtgaagataaatcttcagaaaaaaggctgttatgaacttgtagcgctacatattcagtaagctcgtttaaacatagcaggccatgaaaggaactttcttccagcatattcattagtatctcattcttaaacaaacatgaataaacaatttgagtaactgagctttgtgcataatttggttcaaacgctgcattctttaagttagtattctcaataacctttgcggctattttgtttttgatagcgtcgtcaataggtggtacatctgcctgggcaatgcccagattaatcctggaggagatggcggcttttctttcctgttccttccagtcacataaattacccttttctgccatggcgataagcgtctcttttatattttttaggtcaacgggaaatgttataccgccggatagcgagagtagtaaccgctcagggaacaagcaacatagctcttcacaaacataagtgctagcttttatagtaatatcagaatatcttttcaggtgggcaggctgagtatcaacacagagcactgttctattcattatatcataatagtagtgatcctgacgtatcacaatgcataacggaatatcttcgccatctttaataaagagatttgtatattgacactcagcatctttatagtgctgaaaatggaaatttcctctgcatgacggagatgataattcatataacgcgcaaaataaatcaaataaacgttgcgcgtcaggcggagaggcaacatcacataattcctttatatattgatcggcagtggatctttgcgtgtcacaaaaaaaatctttaatcctttcccatagtaacgtaaagaaggagcgttgagagatagcactttgagaaaacatctcactctttaaaaatcctctcccgatagtaattggcataatgtagaccacaagtgattatatgatacttcattactggaataggtggtattcgaaatattatcccatgttgcccatcggtttgcctatcggtgaaacacctgatttttgctttgtcctgaaccgtcaacattattgttcaattgttcaaatcgacccgtagctttagtcatgcccacgcctcctggccatgaaatatgtcagataaaacgaatgaaagtaaaacggttttcttaattctcacatcatcatgtactatgagtaatgattaattacgcactatattatttttagagaaagtaaatagttgctcaaccgtgtagaaattgtcttataagaagttaaactaaaagtattattaggctaacaacaatgagatgtttagcggtagggcagaaggccaatactgatagtgcttatgatataaataccttactctttagtttttgtcttaattatatttgttgtaacgattagctgacggctttatttccagttgggcgataaaattataaaaacctgcgaggaggctcaaaatgaagaaatcagatggtgaaattcacgaaaagacagcatcctggggcattttgcagtcagaatggctaagaaaatgtggacggctattattgctgttactttaccgtttcgttatcggatgggctttttttcaattacttgccatgatcgtggcagggatatttttgttaggcgtcttattatttcatcccataatatttgtacagactatcgcaatcactgagaagttaaatcatgcttcgcttgatttatggcatatccttaagttatgcctatggcattacggtatcatcgcagggtttatttttatggcggagtgtacgttaagtaaaagtatacggcaggttcagcgcttgtccaaaaaatttggggcacaggatttttcttcacgcccgtgatccgccgctgcaacctgcggtcttactgaataatggctatgaccagcagaccgaattatctcggttcgagggggattctatgtgtttgcacaactgcagtgaatcgtaatttcagtgcattatcgccgacaatcgacgtgttcctcactaattgccttcctgactatatagtggtcttatctttggcgaaacaatgttatttagttatggaaggcgacaacaactgtactactgattatcaaatgacctttctggtcaggtagactcgcctttgtgaaaacacatcgttatctgtgctcctgagactcactcccttgccgcctttacgcaactcgaattattttgggtatagaacaggaggcgcagtggtcgtataagcaaaatataaactctccgtttgtgataaggcacagattacagggggaatgatgtttattttaaccatctgtttaagcggtgtccgctaatctttacctgctcaaatacataatcacccctgtgactctcgcgaggtgtaacatatggtaaaatgcgtatcttctttcctcctgttcagcctgttgtccgttcaggcaatgtcagctgaaaaccatattgatctccaccagccaaaagactttgtcgatattactacggtcgcccccgacgtacaggtagacatgcgatacttcagttcccataactttattggtcgccccattaaaggctataacgcgcctgtttgcctgttaacacgaccagccgcgaacgcagtgaagcaggtcgccgatcgtttacgccccttcggacttaccttaaaaatatatgattgctaccgtccgcaaagcgcagtgaacgactttatcgcgtgggccaaagatccttctcaaaaccaaatgaaaaacgaattttatccgcaggtagagaaaaatcgtctgtttgaggaaggttatcttgccgccagatccggccacagtcggggaagtacgcttgatctaacgattgttccacttgacagtaaaataccaatatacgatcccggacgaccactggtgaattgtactgcgtccgcggcgcaacgctcgccagataatagtctggattttggtaccggctttgactgttttagtccgttatcccatcccgataatgtcatgcttaccgctcagcaacgcgcaaataggttgttattacaaacattgatgcgtgatgcgggttttacgccactggatactgaatggtggcacttctctcttactcatgaaccatacccgaacacttggtttgactttcccgttaagcagagaccctgaaacggcgttttgttgcgaaatctaatcattacgcctgttggaaagcaccataacagttagcaaatcattgttaattttaacaactgatatacactgcggttgccacctgcaagcagcgctcaatgagatcgaataatgaaaaaatatcaacgtctggcggagcaaattagagaacaaatcgcctctggcgtttggcaacccggcgatcgattaccctcgctgagggagcaggtcgccagtagcggcatgagttttatgactgtcggtcatgcgtaccagttgctggaaagtcagggacggattatcgcccgtccgcaatctggttattatgtcgcgccgcatccggtttgtcggtcagtcgcgacggcagcgcacgttattcgggatgaagccgtagatatcaatacctatatttttgagatgctgcaggcgagccgtgatacctctgtggtgccctttgcctcagcgtttcccgatccgcgtctgtttcccttgccgcaattgaaccgctctctggcgcaggtcagtaaaaccgcgacggcaatgagcgtcatcgaaaacttgccgccaggtaatgcagaattgcgctatgcgatagcacgccgttacgcgcagcaggggattaccgtttctcctgacgagattgtcattaccgccggcgcgctggaagcgttgaatcttagtttacaggcggtgacggcgccgggagactgggtggtggtggagaacccctgtttctacggtgcgctacaggccctggagcgattgcgcctgaaagcgttgtcgatacctaccgatgttaaagaaggtatcgatcttatggcgctggaacaggcgttacaggaatatccggtgaaagcgtgctggttaatgaccaacagccagaatccgttagggttcacgctgagtgctgagaaaaaagcgcggctggttgcgttactcacgcaccataacgtgacgctaattgaagacgatgtttatagcgaactctactttggccgcgagaaacctctgcctgccaaagcatgggatcgcgacgataccgtgttgcattgttcgtctttttccaaatgtctggttcccggttttcgcattggctgggttgcgggaggaagccatgccagacaaattcagcgtttgcagttaatgagcacattatccaccagttcccccatgcaattggcgttagtggattatctctcgacacgtcgatatgacgcgcatctgcgacgattgcgaaggcagcttgccgaacgtaaacagcaagcctggcaaacccttttgcgccatctcccggcggaagtaaaaattcaccataacgatagcggttattttctttggctggagctacctgagcagcttgatgccggtgaacttagcgccaaagcgcttgaacaccttatcagtatcgcgccggggaaaatgttttcaacgtccggcgcctggacgcgtttctttcgttttaacaccgcatggcattggggagaacgggaagaacaggccgtaaaacagcttggcagcctgattcgcgagatgctgagcgctaaaagccttgtgtgaggtggaatgcgtgtcagctcacaacctgactaaatttcccgagtgtgccgggtgagcatctggcgcgccgtctatttttaggaaagcggcggcccgttcgccggaaatcgattaatgacgatatgggaaaatgctatgcaatatcaattactgattaatggcgtgctggtggacggtgagggagaaaggcagtctgtttataacccggcgacaggcgaggtcatacttgagattgcggaagcgtcgcccgcgcaggttgacgccgcagtgctggccgccgatagcgcgtttgccgaatgggggcagaccacacccaaagcacgggcggaatgtctgttaaaactggcggacagcatcgagcaaaacgcccttgagttcgcccggcttgaatcgcaaaactgcggtaagcctttgcactgcgtaattaatgatgaaattccggcaatcgtggatgtctttcgcttttttgccggcgcggcccgttgtttgagtgggctggcggcgggcgaatatctggaaggacatacgtcgatgatccgccgggatccgattggcgtggttgcctctatcgcgccgtggaattatccgctcatgatggcggcctggaagctggcgccagcgctggcggcaggtaactgcgtggtgattaagccttctgaaatcacgccgctgacggcgcttaaacttgccgcgctggcgaaggatatctttccgccgggggggctcaatgtcctgttcggacgagggcagactgttggcgatgtattgaccggtcatgaaaaagtacgcatggtctctttaaccggttctatcgcgaccggggagcatattctgcgccatactgcgccagcgataaaacgtacgcatatggaactcggtggtaaagccccggtgattgtttttgatgacgccgatctggatgcggtggcgcagggcgtccggacttttggtttctataatgccggacaggattgtactgcggcgtgccgtatatacgcgcagcgcggtatctatgatgcgctggtcgaaaagctagggaacgcggtgagcagcctgaaaatgggcgcgccggaggatgagtcgacagagctggggccgttaagttcgctggcgcacctgaagcgcgtcacagcggctgtagaggaggcgaaggccctcagccatatccgtgtgattactggcggaagtcaaacggaaggtaaaggttactatttcgctccgacgttgctggcagacgcaaaacaggaagatgccatcgtgcaacgcgaggtcttcggcccggtggtcagtataaccgtctttgatgatgaagatcaggttctgaggtgggccaacgattctcgctatggtctggcatcctccgtctggactcaggacgttgggcgggcgcaccggcttagcgccagattgcagtatggctgtacctggattaatacccatttcatgttggttagcgagatgccgcatggagggcaaaaacagtcgggatacggcaaagatatgtcattgtatggtctggaagactacacacttgtccgtcacatcatggttaagcattaaggatcatttactgttcagaaaaatcgtgaaaaaataggcgggtgtcggcggagagggggacctccccgccaacatgcgcagcaagtactcaaaggttgaacacctcaagcaaaccagccgaatctcaacgagatcagacccaaaagtcctgcagcagcaaagacattaatcagcacgacggttttactggaaacattcattttcgccacctttcatcataacccctatgggtatagtacgggttggcgagatccgcaataatacgtaaacaggatattctgtgagcggagccgtgcattgagaacgttttgctgttaaggctgataaaccttgatgtgcgtcaaataaaaagagcatattgcgcgcgttttttcctctggttggcgcggatgcctgatatgaccctctttcaaaagatattaattttttacgccgtcatggcggtgatatcatccctgatcacctggtttttgactcatgacaaaaaacgaattcgtttcctgagcgcctttttggttggcgcgacatggccaataagtttccccgtcgcattgctgttttcgcttttctgacctcaagcccgatacaggttaccgggcatggtttttccgccaggtcaggctatcagggcaattaattgcgctctgtctacgtcggtaacgtcctgcggatgccgatatcctgcgttctcattggccagggtatacagcgcaacaagccagtcatagacatagcggctggcggcgtgaacgggctgttcgtcaagctttgttagacgcaacattgtcgaacgcggtgttgcggcgaaaatggctgcgcctttctgaacgcggctggccgggcgttgggcctcctcgatattggcgtagccgagccaggcgatgaagttaccaatgatggcatgaagctgcgcgccgctcacctcctcgcgctgcatggttttctgtaactgctgaggtaaaccgaggcgatagctggcggtaattaaaatctccgccacggcgttgagcatctgcggttccagtcccagacgctgcgcattatcccggcagtgggcccactggcgcagatgattgatccacattttgtgcgcctggtagcctgtttcgtgaccttctgacgctgaagcgcgcgttggttcgtcggcaaagagatcgatcgcgtcattaaataaaccgcagacctgttcttctcgtgactgtcgggtgcgcagcaacgcttcgaaattctgtactggcggtaacagcccggccagcaggtcgccatgtctggcggcctgggcctgaagacgccggatcacggtttcaaccggtagccgcgcgtcatcaaacatcggtaacagatcgcgcacgcggcctcgcagttgttcgcgtaacgcctgtaagcgcgcctgtcgctgtggtgccgatgtcgcctgcgataaccattccaccaaacgctgcatactgtgtttatccagcgcctgcaacgttccccaatgcacgccaggtttacccatcaactgctggacggcttcatccagattttgctgggtggcaaaacgggcatcctgtggagtaatagcccagacgacgccgggtaacgctgattcatgctgcggctgcgtggcgttaacccactccagtaagtgacgggcggcagtggacgtttgcgagcgagatgccagagcattgcaaatcaccagaacatcgggctgtacctgttggcggtaatgggccagcatccagcctaatttcgcccgccataacggatgaggatgactgtctggcgcgaccggaatatccagtaaatctacgttatccagtacgttgttttcaacggttagcaccagttcgcgggtaagcagcgccagagaatcaagcgaaaggctgaccgcattgagcagtcggccttccttaaccggatgcaccaccacatcgatttgcgtatcgttggcggttagcgccatttgcgtcaggaagttttccgccggtaagccaaaatgatcgaccagcaggctgagcggcgccgccagttccccggcatggccggtttgttgcaacatatgcgccagcgccagccattgctgggtgatctccggttgctctccccacagtaatgcccaggcgtgcgcccgtgtcgtgagatccagcgcaggcaagagcgaggcaaagtgttgccatgtcgcatcatcaatatgttgtctggcggacggcaggcaagagcgccagaaactcgcgatggtcgctacctcttcagcggtaacgccggggacgggctgcggttggcgaagcgattgccatttctccaggcgtgatgtgataatggatttttcgacctggcgacaaatgggggacgcgctggtccaggcaataaagatctgcaccagttcggcttcactgatcaagcgcaggcgcaacggccagccgctctcgtttgaaaaaatgtcgcgcgtaaagcgaatagccatattcgctggcgcatgacccggattgatgtggctgaaataatcatagtcacggtccggcgtgataatttccagcttgccattctcgttaccgcatagcgtcgttaacagatgcgcttttgcggattgcgcatacccgtacagaccaacgcagccatgtgacgcgcaggcggcgttgagcgctgactcatccgccgcggcaagcgtaagttgcgccagcagagcgtcggcttcgtcatccagtcgcgttgcgtaacggcgcgtgttgttaacccactcgataacagcctgggtggcgtttaacggttttgtcatttcaggtatacactcccgctatctatccagtagtggctgccgctgtggcggcggtcagccagcgtattcaattttaatgtcagcgcatcggcggcgaccggcgtcccgtcctggagccaggcatcacttaatatgaacgattccggggcgctatctttgctactgccgcgtaatttcagtcgcacattcagtacgccgtcgccagcgatggttttcgccagttcggcggaattaatgctcaggcaataaagtggtgttgccggccagcgactgttcgccagttgacgaaagcccaacgtcacgttaccgcgtagcggaaaatgcaagcgagcgtccagcgttgcgccgggtttatccaaatcgatttcgtgataccagatgttttcatcgcgaagggtattaacggtattatccagtacgccgagataacgtacagtcgaatacgcgccgatatcagccgctttaaaattgaaacgcggcagacgtaagtccagcgccaggctgcataacatcgcgcccaccgcggcagtggattttgggttaccgatacgcccttgctgactgaagggataccattcatgtacctgatacttatccatccacacaatgcgattaaccggcaccggttgtaagtgccggatgagcgcctgtacgccgggtaagcaggtcggtctccccgtcaccagcaagatatcgcagtgatagtgggagatcgcttcgcagaccgcatgaagcggcgttgttagcgtaaactgaccggccagcagagcctcctgaagctggctaaactggatttgcaacggcacattgaatatatcaaatgtcggcgaaccagacggtaaggcatgatcgatcgcctgctggatatagttcatcacgttgctcgttgggcggcggatcagcagatcgccaaatgtcgcgtgtaaaccggcaaacggatcgttaatgtcgctttgctcccaggcggaaagtaccgcatggcccagcggcataaataattgcagcgccgtttgctgacgcaaaatggcctgagtatcaattcgtcccgaatcgccaaataaggtcgccagcagggcggcggcatccgtaacgcctgcccgttgcaacgccgtttgcagggaagggagtacacagcgctgaatgatatccaatagcagatcgtccccggcgactttaaaaccttcgcgaaacaggagatgaggcgtaatttttacattggcccccacgccgtcatctaactgatagtgaacgatcgccatatccgtcgtgccgccgccgatatcaatcgatgccacgcgcaacgcgcgtccggggacgacgccgggttcaggctggcgatccggtctggcgagcgcattaaaaaaggattcggtacgcccggcgtaatgcgaaatggcttcgttataaagccataccagttggccgcaacttgcttcgtcccattccatctgtatttctggtaccggcaccacgcttttttcacgctgcttaggcgtggtgaaatcctcatcctgcggatgccagcccatggctttccagaccagcgccagcgcttcaaacattcgctggcggaaaatttctcgctcctgtttcggcatggcggaaggcagcgttaaaatcagggtgcgtagctggcgcggcgaggcgggaaagccgagccgcagccgggtggcgacgctgttaatttgccccagcgcctgagccagaatttcgcacaacatatgcgtcatcaaggtgctacggctgtattgcggcgaaaaaaccggtagcctttcttcatgcggcaggcggaataacggctgtccgtcatcgttcatcagattcatcagcggaaacgcggtggcaagcgcttcgcgctgcgttttaccgtggatctggctaaaacgccagtcctgcaaggcgggggtttcatcccacaggtagcgacgcgggctggagatgccgctgctgccttcggtgcccacacgctgcatagcaagggcgcgagcctcgtcgcccacacgcacaatggaaggccagacaaaggcgtcgtctcgtccgctttcgacagaaaagtgttgcttgccaaagcgtgcttccgagaattccacccggctggtaaataaaggatcgttcagatactgcggctcgcttaaagaacgcacctgaagctctgccgtctggcgtaacccgtcattcgcatcgccatgatcctcgatcaagacgccgcaggtatgcgtattgccgacatccagaatcagatcgaccgggattgcgggcgtgcttaacgtatgtgtcacaaactttacttccggcaccgtaagctgttcgcctaacagcgtcagtaaattcaaccagtgcgcctgatactcaaagctacgcagcgcttgttgtatggcctgttccgaacggttttccacctgtgaggcatactgaagaaacgactcgcgcagccagccgtcaatccatgtctggtcaagaaaatcggcaacttcttcatcctgccaggcgagcgcaaaacgtgtgccattgagcagatcgttttcgcaaggcgccaacgccgcaggcatattttttgccagttgactgtcgaaggcgagggtgatccggtgtgtgtttccggcgctatctggctcgctgagtttacgtacctgaatgcgcgcccagttatccggcccgtcaataaaggtacgcggcggattaaaacgcaggaacggcaggggaagccagattccgtcgagtacatccagagaatagtgcagcgtctgagtgctttccggtttcacgacttcgggttggccgccagcacgtccaggcaacgtgtagcgcccgctggtcagatcaaaatcgaggcgcagtagcgggccgtttgccgttttgcgcacaaaacgtccgtagtgggccgactcttgcggcgttaagccaaaatcaagaaactggacgccactgtttgcaatgagcgtgacgctctgtttgtaatcacacagattgaccaacataaaatcaggcacctatctttttaaacgtcaacggaattgccgcgtggtcgccataacgggcggtacaggttgcgacgtcattgacgcctgctttacaggtaatttccggcatcggataacgtgaaccgtcggtgcagcgcgcattgccgcgacttttaatcatcagctcgcccgtttgatgcagaccagagaaaatttccgcccgacaaaccacgttatcgccatgtactacgcgcgcgatacctttgttattttggatctgataacgcagagagggcggcttgccggtaatcggatctttgacatccacgctgacccgccagctaccgtttaaaaagcgcgtggttccaagcttcatctgcgtactgtccatcaccagcgcgtctttgggaatagcggcaatgataacaggcgcttccggcagcggcgccgctttgggggcgggcgtcacctcagcgcgatgcagcggcaaatgcgcggtgagttcaggcaatggggtaacgtcagttttcgcggtagcgacaggcgcggcgcgaacaggagaggacccgtcaacggatgaagatggccagaaaaaaggcgtggcgacggcggcgataaccacggcagcgacaggtaagctccacagcggtagacggcgagctcttttcgcctcagcaaccgggatgggtgtggccggcttcggctcgctaacgataacgggcggcgcaacaggttcctccggcattttcggcggctcaatgacagacgttaacaaaggttcatccgcctgactaaatgccgcctctaccagcggcttttcttcgggctccggctccggctcgaccagagggatgtcggggattgcctcggttacccgcaggcagtccagcacatcatcgcgtgtattttcgttgagattaacgaatccccagaaggtgataaccggtttgccgttaaccaggaaaacatgattttcgccgggaaattgcgtcgctttctcaagtagcgacccaaatagctggagcgctgttttaccggattgcagacttttgcgactgagtgcagccgcgctttcaaaagtgctggctaaataacgtaaagcccgagaacgtgtctcttcgtcagccgctttccacgctatcgcctgaccttcaatcggcgaataccagtcaacccgatcgccattatcgttaagttgcggaatcgccagacagtcaaccatcgcctgctgtttacgcagacgaagcgtttcgcgaatttgcaatgctgattcaaatacggcctgaccgccgccgcccacggcctgataatcatccagattgccgctgcgcaagagagattttgccacgttgttatcccttagacttcttcacgcgtctactttacggggtctatacgcaagcaaacggcggaagaaaggcaaaaaggcgcgaattctcggtctattaagccccgtgttttcacttgacgtaagttaaatcaggagggcagcggcgaattaccgcatcgggcgacaataacgcgtataataggcgaatcatgctgttacagaataaagagtaggagagcttatgtcgcacctggaggaagtgagcgcccgcgtggatgccgccatcgcggagagcgtaattgcccatatgaatgaattgctgattgccttgagcgatgacgctgaattacgtcgcgaagatcgttatgtgcagcagcagcgtttacgcacggctatcgcgcatcacggcaggcaatatcaagaagatcgggacgcgcgccgcgagcagctcaccaaaggcggcacgatcctgtaacccattaaaactggcgcttcgcaatcagccatgcgccaatgaccagcaacagcgcgccaaacgccggcccgaccattgcgcgtaacgtgacgccgtggctacgcgcgatatccagcgccagtccgccgattaactggctggcgaccagtaccgcgatagtcgtcgcggcgccaacgttctgatacccgctaatgctggcaaatacaaaaaatgaccccagcagaccggggatcaatgtccaccagcgaacgctggcgaccagctcgccgaaacccgcagcgccttgcttaaaccacaatatcgtcacaaataaaacgatccctaccagcgagttcaacagcatagcgatcagaatcgtcgatgatgtctgcgtaatacgcaccataatactgttttgtaccaccagcccgacgccggcggcgatcaaaaagataagcgtcaaagactggttcatcagcaggcgtccggcgcggcgtgttcatcaagctggagctgcataaacgtaagatctaaccaacggccaaattttacgccgacctgcggcatttgcgcggtaacggtaaatcccagcgaatgatgcaggcgtatcgaggcggcattctgtgactcaataccggccaccatcacatgcttgccgcagcgtcgggcttcgtcgatcagtctgctgagcagctttcgccccagtcctttcccctggtgcgccggatgaacataaaccgagtgctcgacggtatagcgaaaaccgtcgaaactgcgccaatcgccaaatgatgcatagccagtcaccacgccattttcttcgcttaccagcaccggatagcccagtaattgacgggcctcataccaggcaaggcgattatccgtatcgaccgtccgatcgttccagatggccgcagtatgtaataccgcatggttatagatttcggtaatcgcggcgcagtctgctttatcggcaaagcgaatcgtcatagggaaccccagggaatgtttacgatagtgttagaaatactattgaaggcggcataaatcaacgaattagcgcaagaattcatatttagcgagaggggaaagaaagtcgttcataaaagcgcacagcctgatatctgagagtgtttaactccctcagaaagctaatgttcgactattattgatggattatgccaggcatgaggagaatagaatgaagcaacagaccaaccgaaatcgtcgttgggttttggcctcgcgtccccacggcgcgccgcagatggataacttccgcctcgaagaagatgacgtcgcgacgcccggtgaagggcaggtgctattgcgtaccgtttttttatcactcgacccttatatgcgtggccgcatgagcgatgaaccctcatatgcgccgcctgttgaacctggctgcgttatggttggcggtacggtcagtcgcgttgtcgcgtcaaaccatcctgattaccgaccagacgaatgggtgttgagttacaatggctggcaggattatgacatttcagatggcgaagggttagtaaagctgggtgataatccgcaacatccttcctggtcattgggtattttaggaatgccggggtttaccgcctatatggggttactggatatcggccagccgaaagagggcgaaacgctggttgtcgccgccgccaccggccccgtaggcgcaacggttgggcaaattggtaagctgaagggctgccgggtcgtgggtattgctggcggcgcggaaaaatgccgtcatgcgacagacgttttgggatttgatctgtgccttgatcatcacgctgataatttcccacaacagcttgcgcaggcctgcccgcagggtatcgatatctattatgagaatgtcggtggtaaagtctttgacgccgtcttaccgctactgaatacgtcggcgcggattccgctctgcggtctggtcagcggctacaatgcgacagcgttgccggacggtccagacagactgcctctgctgatggcgacattacttaaaaagcgtattcgtctgcaaggttttatcatcaaccaggactatggtcaccggatacatgagtttcagcaagaaatggggcgttggatcaaagaagggaaaatacattaccgggagcagattactgatgggctggaaaatgcgccagaagcgtttatggggctgctggcggggaagaactttggcaaagtcgtgatacgtttagcggacgatgcgtaaagaaaaaatggcggcattatgtcgccataaaaatgtgcaaattttaaaattccggctttacttatattcatcattcagatcgcggtggggcagcttatctcgctcagcggcctgaaccggtcaaaaatctcgatacatgaaggaatgacggagataaaacggttgccataaagaaacctgtattgttgtaaaagatgagaatatcacgcaagtaaattatcacttttatttatttggccgttcaggcctggattatcttttttacaattaagttccgaaacttcttcgggactcgattgcgatgttgttctgccaagaggtgaaggaaggaaaatgccgggtacggaaaaaacacaacatataagcctgaccacacaggttgaaaatcggttaaagcatcaattgtctattggcgcattaaaaccaggcgcaaggcttatcactaaaaatatcgctcaagagttaggcgtcagtattacgccagtgcgtgaggccctgttaaggctggtctcttccagtgctttggcggtggcgccagcacaggcgtttatggtgccggagatctcgctggaaagtttgctggaaattaatacgattcgtactgccctggaggagatggcggtggtcgccgctgcgggtaagattaccccggatcgcgagcagacgctgaatgcgctattagatgaatttcaacaggcgctggaaagtggcgttatggagaaaattcttttggccaaccgcgcattccgctttgagatctaccactacgcggatatgccaacgctgtatgccatgatcgagcaattatgggtacgcctggggccaagtctgcattttttatatgataattttaaacttgatgattatcaaaacggcgttaatctgtacagaaaattgcttaatgcgttagtgactggtgataaagaagccagtcgccactgcctacagaacgttttgcaacaaaacgtagcgacgattaaaaatcagtacttcatgtaactttcatgaaactatgactaatcaatagcggggatgccccgctattgccggatatttattcaaattgccatgccagattaatccccacgccatagttacgccctggcgctggctcataatatcggccattagattcattaacgatcaccgaaccgatatattctttatcaaatagattatctacccgcccaaaaatatcgacggtaagctgactgtaattaaatttataccctgtatttagtccaacaacggtatacgaaggcgctttggcggtattttcatcattggccatgatatcgcccatataccgaacgtctgttccggcgtaccacccctcatccgggataaaacctaatgaggcgaatcccatattacgggcgatgccgggcatccggtttccatcacagttttgcccctgacaaacgttactgcgataggtcgcatccagccaggtccatgatgctttcacccgccagtcgccggcgaagcgctggtccaacgcgagctctgcgccctggcggcgcgttttgcccgcgtttttgtaggtagtgcgtcctcccatactactggcgacgacaatttcatcatcggtatcggtttgaaataacgcggcggtcaacaagccattgccaatccgcgttttactgccgacttccaccgtatcattggtcgacggtttgaggtcaaagttgaacccgctttggccgtcagcgcgataagaaagttcattgatagtgggagtttcaaatccgcgaccggcagcaagatagagattccaggcgtcagttaacgcatattttagcgatccggcgggtagccagtggtgatagctggcgtcgccgctgtcatcgccattgccgggcgcgatatagtgatcgttagaatcgaaccacacggaactgtagcgcacgccagcatccagcgagagtttttgcgtaagctgccactgggtttgcagataaggatcgacattccacatcaggttacgctcatcccgccgtaaatcgcctttatgcccgaactcaggggggccgttgttgagacggaagttattgtaacccttgcggttttcgctcatgttttcatagtttaacccgccagtgaaggtgaccggcacacctaattctccccggtgagtccagcgggaatcaattccctgatagtggcgttgcagtgtaattacgccgccagcctgggctggttttagctgtgccaccaggggaatagactggtattgcgtggtttcccgctctccggcgtaggccatcacgctgatatcatcctgcgcgctgagctgacgttcataacgcaatcctgcctgagtttgtttgatggttttacgcgtattgtactgttcagcgcgcggcgcctgttgcggatcggctttccattcagattcggtaagtccgccgggatcgtccgccttaatgtccacactattaaaaatcagcgaaagtttactgacatcgtcaaggcgcacgcccagtttggcattagccagattttttcgcgcgccgctgtgatcgcggtagccgtgggtggtgaaacgggtagttgataccgtgtaatccacgtcgccaggctgtgtgccgtcacccatcgcgcccgtggcttttagcccatagcgccagcttccataactgccgtagtagctgctggcctcaatcccggtttcggtggtgacatttattacgccgccggaagcattgccgtatagcgctgagaaggggccgcgtaacacttcaacgtcttgtatgctgttaatatcaatattcgaaatctggccttgtccatccggcatggtggcgggaatgccatcaacatacagacgaatgccgcgcacgccaaaggcggaacgcgagccaaatccacggatagagatttgcagatcctgcgcgtagttctgccggttctgcacctgcaatcccgggacgctggttaaagtctcagataaattaacgcgcggcgtcgccagacgcatgtcttctccctcaatgacgctaacggcggcaggtgtatccagttcggatacggtttgcggcgttgcggtgactatcatggtttgttcattggacgcgctggcggcctgaaggaccggggagaaggtcagaggcaataagagggcgggataaagtcgctgtctaacggaaataattttcatgaaaatgccggataaatgtaagcgtatcaacggaaaacgtgacattaagggtagtcaatatgtaaagttttgaaattttaatcgcacattaagttaagaaaatgtgcggtatttaagagccatgacattcgcaggcgaggaaaagctccactttctgataaataatgattattattctcaacttataataagtgcggaacgaagatcccgcgcagcgaagtagtgtgaagcagctatacacgtttttatcaaagggagtcgtcatgcacttacgtcatcttttttcgccgcgcctgcgtggttctttattgttaggttcgctcctcgtggcatcctcatttagcacgctggcggcggaagacatgctgcgtaaagcagtaggcaaaggcgcttatgagatggcctggagtcagcaagaaaacgcgctctggctggctacatcgcaaagccgtaaactggataaaggcggcgtagtttatcgtctcgacccggtgacgctggaaatcacgcaagcgattcataacgatctcaagccgttcggcgccaccatcaatgccgcgacccaaacgctgtggtttggcaataccattaacagcgctgttaccgcgattgatgccaaaacgggtgatgtaaaaggtcgtctggtacttgatgcgcgcaaacgtactgaagaggttcgtccgttacagccccgtgagctggttgccgatgcggcgaccaacacgatctacattagcggtgttggtaaagagagtgctatttgggtagtggatggcgaaaccatcaaactgaaaacgacgatcgaaaataccggcaaaatgagtacgggtctggcgctcgacagtaaagcgcaacgcctgtacaccaccaatgcggatggcgaatttatcaccatcgataccgccagcaataaaattctcagtcgtaagaagttgctggatgacggtaaagaacacttctttattaacctgagtctcgataccgcaggtcatcgcgcgtttatcaccgactcgaaggcgactgaggttctggttgtcgatacccgtaatggcaatattcttgccaaaatcgcggcgcctgcttctttggccgtcctgtttaacccgacacgtaacgaggcgtatgtgacacatcgtcaggcaggtcaggtcagcgtgatcgatgcgaagacctataacgttgttaaaacgttcgatacgccgacgtacccgaatagcctggcgctatcggcagacggtaaaacgctctacgtcagcgtgaagcagaaatcgacacgtgaacaggaagcgacgcagccggatgatgttattcgcattgctctgtaaatagggtatggagggggaaacccctccagtcatctctttaaacgcaccgatacgcctcgttacaccccgccgatagcctgatgattctgtgagaattacactgcctttttgctgtagttaactcattatattcacgaggaaaatatgaaaaagttatttatatgctcaggtttgggcatgatgttttttatgcttgcgggttgtacaaccaactatgtgatgacgacgaagaatgggcaaacgatcgtaactcagggtaagccgcagttagataaagagacggggatgaccagttataccgatcaggaaggcaaccagcgggaaattaacagcaatgatgtggcgcagttgattaaggctgactaagcattgggcgcgatgcggtgttggcggcaacgcgcattaaacccggcaggcctggggctgccggggaaggggaatgttatgtcgctgcttcttctttcaatacgacactctctgtcgaatccgccgtcactggcgcagtgcgatggatctccgccacgcgacgtcgcacgccaaaccagccggcgaccagcagaatggcgatcagcggcaacgaggcgatagtgtaagttccattcgggtagtcaaacgccatgagtaccagcacgcttagtaaaaacagcagcgttagccaggaggtaaaaggcgcgccgggcagtttaaaactgacgtctgcggctttgccttcttttatcgcctggcgtaaacgcatc

(The sequence listing continues in the following parts.)

What is claimed is:

1. A method of identifying a strain or serovar of Salmonella enterica in a sample comprising:
determining an allele corresponding to a single nucleotide polymorphisms (SNP) for at least ten SNPs from nucleic acids isolated from the sample; and
determining the allelic composition for the at least ten SNPs selected from a panel of SNPs, wherein the presence of certain alleles identifies the strain or serovar of Salmonella enterica.

2. The method of claim 1, further comprising the steps of:
creating a SNP profile of the sample nucleic acids comprising the allelic composition of each SNPs for the at least ten SNPs selected from the panel of SNPs;
comparing the SNP profile of the sample nucleic acids with a database of Salmonella enterica strains SNP profiles; and
determining the strain or serovar of the Salmonella enterica comprised in the sample, wherein the presence of certain alleles identifies the strain or serovar of Salmonella enterica.

3. The method of claim 1, wherein the panel of SNPs comprises fifty two SNPs comprised at position 101 in nucleic acid sequences described in SEQ ID NO: 1-SEQ ID NO: 52 or complementary sequences thereof.

4. The method of claim 3, further comprising testing the nucleic acid isolated from the sample to determine an allele corresponding to a single nucleotide polymorphisms (SNP) for at least twenty SNPs selected from the panel of fifty two SNPs comprised at position 101 in nucleic acid sequences described in SEQ ID NO: 1-SEQ ID NO: 52 or complementary sequences thereof.

5. The method of claim 3, further comprising testing the nucleic acid isolated from the sample to determine an allele corresponding to a single nucleotide polymorphisms (SNP) for the entire panel of fifty two SNPs comprised at position 101 in nucleic acid sequences described in SEQ ID NO: 1-SEQ ID NO: 52 or complementary sequences thereof.

6. The method of claim 4, wherein the testing comprises the steps of:
a) identifying at least a first target nucleic acid sequence comprising a first SNP from the at least 10 SNPs selected from the panel of fifty two SNPs comprised at position 101 in nucleic acid sequences described in SEQ ID NO: 1-SEQ ID NO: 52 or complementary sequences thereof;
b) hybridizing at least a first pair of polynucleotide primers to the first target nucleic acid sequence comprising a first SNP;
c) amplifying the first target nucleic acid sequence to form a first amplified target nucleic acid sequence product comprising the first SNP;
d) determining the allelic composition of the first SNP from the first amplified target nucleic acid sequence product comprising the first SNP;
e) repeating steps a)-d) using a different set of primer pairs, each primer pair operable to hybridize to and amplify a target nucleic acid sequence comprising another SNP and determining the allelic composition of each SNP until the allelic composition of the at least 10 SNPs are determined.

7. The method of claim 6, wherein amplification is selected from the group consisting of polymerase chain reaction (PCR), RT-PCR, asynchronous PCR (A-PCR), and asymmetric PCR (AM-PCR), strand displacement amplification (SDA), multiple displacement amplification (MDA), nucleic acid strand-based amplification (NASBA), rolling circle amplification (RCA), transcription-mediated amplification (TMA).

8. The method of claim 6 wherein the polynucleotide primer pairs are selected from polynucleotides having the sequence of SEQ ID NO: 54-SEQ ID NO: 157, complements thereof, and labeled derivatives thereof.

9. The method of claim 6, wherein determining the allelic composition of each SNP comprises analyzing the amplification product by size analysis; sequencing; hybridization; 5′ nuclease digestion; single-stranded conformation polymorphism; allele specific hybridization;
primer specific extension; oligonucleotide ligation assay and combinations thereof.

10. The method of claim 9, wherein the determining the allelic composition of each SNP comprises analyzing the amplification product by hybridization.

11. The method of claim 10, the hybridization comprises:
a) providing at least a first probe comprising an isolated polynucleotide sequence operable to bind to the SNP having a first allelic composition;
b) contacting the isolated sample nucleic acid with the first probe under conditions suitable for hybridization; and
c) detecting hybridization of the sample nucleic acid with the first probe, wherein the detection of at least one hybridized nucleic acid is indicative of the presence of the SNP having a first allelic composition in the sample nucleic acid.

12. The method of claim 11, further comprising:
a) providing at least a second probe comprising an isolated polynucleotide sequence operable to bind to an SNP having a second allelic composition;
b) contacting the isolated sample nucleic acid with the second probe under conditions suitable for hybridization; and
c) detecting hybridization of the sample nucleic acid with the second probe, wherein the detection of at least one hybridized nucleic acid is indicative of the presence of the SNP having a second allelic composition in the sample nucleic acid.

13. The method of claim 10, wherein determining the allelic composition of the first SNP from the first amplified target nucleic acid sequence product comprises:
a) providing at least a first probe comprising an isolated polynucleotide sequence operable to bind to the first SNP wherein the first SNP has a first allelic composition;
b) providing at least a second probe comprising an isolated polynucleotide sequence operable to bind to the first SNP wherein the first SNP has a second allelic composition;
c) contacting the isolated sample nucleic acid with the first probe and the second probe under conditions suitable for hybridization; and
d) detecting hybridization of the sample nucleic acid with either the first probe or the second probe, wherein the detection of a hybridized nucleic acid comprising the first probe is indicative of the presence of the first SNP having the first allelic composition and wherein the detection of a hybridized nucleic acid comprising the second probe is indicative of the presence of the first SNP having the second allelic composition,
thereby determining if the allelic composition of the first SNP in a sample nucleic acid corresponds to the first allelic composition or the second allelic composition.

14. The method of claim 13, wherein the first probe is labeled with a first detectable label and the second probe is labeled with a second detectable label.

15. The method of claim 13, wherein the first probe comprises an isolated polynucleotide sequence selected from SEQ ID NO: 158-SEQ ID NO: 209, and a second probe comprising an isolated nucleotide sequence selected from the group consisting of SEQ ID NO: 210-SEQ ID NO: 261.

16. An isolated nucleotide sequence comprising at least 15 nucleotides of SEQ ID NO: 1-SEQ ID NO: 52, comprising at least nucleotides located at positions 100-103 of SEQ ID NO: 1-SEQ ID NO: 52.

17. An isolated nucleotide sequence comprising SEQ ID NO: 54-SEQ ID NO: 157.

18. An isolated nucleotide sequence comprising SEQ ID NO: 158-SEQ ID NO: 261.
